(19) United States
(12) Patent Application Publication
(10) Pub. No.: US 2023/0212532 A1
(43) Pub. Date: Jul. 6, 2023

(54) P450 BM3 MONOOXYGENASE VARIANTS FOR C19-HYDROXYLATION OF STEROIDS

(71) Applicants: BAYER AKTIENGESELLSCHAFT, Leverkusen (DE); BAYER PHARMA AKTIENGESELLSCHAFT, Berlin (DE)

(72) Inventors: Oliver KENSCH, Pulheim (DE); Kai THEDE, Berlin (DE); Petra HELFRICH, Falkensee (DE); Lilly SKALDEN, Berlin (DE); Ludwig ZORN, Berlin (DE); Sabine TRENNER, Berlin (DE); Jens BURMEISTER, Leverkusen (DE); Nils KRETSCHMANN, Monheim am Rhein (DE); Florian RICHTER, Köln (DE); Wayne COCO, Pulheim (DE); Marcus LUDWIG, Monheim am Rhein (DE); Dalia BULUT, Burscheid (DE); Frank BERENDES, Münster (DE); Jens PILLING, Dortmund (DE); Jakob WAGNER, Oberkrämer OT Schwante (DE); Ruben LINNHOFF, Berlin (DE)

(21) Appl. No.: 17/759,954

(22) PCT Filed: Feb. 1, 2021
(86) PCT No.: PCT/EP2021/052295

§ 371 Date: Aug. 2, 2022

(30) Foreign Application Priority Data
Feb. 3, 2020 (EP) 20155122.3

(51) Int. Cl. C12N 9/02; C12P 33/06

(52) U.S. Cl. CPC C12N 9/0071; C12P 33/06; C12Y 114/14001

(57) ABSTRACT

The present invention relates to novel recombinant Bacillus megaterium cytochrome P450-monooxygenase (P450-BM3) variants for the C19 hydroxylation of steroids and derivatives thereof or for improved BM3 protein expression. In particular, the present invention also relates to methods and processes using P450-BM3 variants for the production of estrone and estradiol. The invention further relates to nucleotide sequences, constructs and vectors for the expression of these P450-BM3 variants

### FIELD OF THE DISCLOSURE

[0001] The present invention relates to novel recombinant Bacillus megaterium cytochrome P450-monooxygenase (P450-BM3) variants for the C19 hydroxylation of steroids and derivatives thereof or for improved BM3 protein expression. In particular, the present invention also relates to methods and processes using P450-BM3 variants for the production of estrone and estradiol. The invention further relates to nucleotide sequences, constructs and vectors for the expression of these P450-BM3 variants.

### BACKGROUND

[0002] The steroid hormones estrone and estradiol and their derivatives are used as medications, for instance in menopausal hormone therapy, contraception and oncology or are important intermediates for the synthesis of further steroid products. Estrone and estradiol can be generated in several steps starting from phytosterols. The different degradation products of phytosterols contain a methyl group in position C19 of the steroid ring systems which needs to be removed in order to synthesize estrone and estradiol and their derivatives under aromatization of the A ring of the steroid ring system. Inhoffen describes this aromatization by thermolysis for the synthesis of estradiol (Inhoffen 1947) and Hershberg et al describe this aromatization by thermolysis for the synthesis of estrone (Hershberg 1950). However, yields are not optimal and various side products are formed. Templeton et al. and Numazawa et al. describe this aromatization through steroid products which have been oxidized in position C19 (F. Templeton 1997), (Mitsuteru Numazawa 2009). Therefore, processes hydroxylating the methyl group in position C19 and thus allowing for further derivatization and eventually removal of the substituent in position 19 can pave the way for novel and improved syntheses of estrone and estradiol and their derivatives.

[0003] Enzymes as catalysts are typically characterized by an excellent regio- and/or stereoselectivity for the natural substrates but may show low thermal and solvent stabilities. Due to a narrow substrate spectrum, enzymes are often very specialized compared to chemical catalyst, which limits their broad applicability. It is therefore a challenging endeavor to find or build an enzyme which catalyzes a specific reaction with commercially exploitable yield and sufficient purity.

[0004] Cytochrome P450 monooxgenases (P450s) comprise a large group of heme enzymes that are ubiquitous in the natural world. Cytochrome P450 BM3 (P450-BM3, BM3), obtained from Bacillus megaterium has previously been described to catalyze the NADPH-dependent hydroxylation of long-chain fatty acids, alcohols, and amides, as well as the epoxidation of unsaturated fatty acids (see e.g. (Narhi 1986) and (Capdevila 1996)). For P450-BM3 the reductase (65 kDa) and monooxygenase (55 kDa) domains of the enzyme are fused and produced as a catalytically self-sufficient 120 kDa enzyme. In consequence, P450-BM3 enzymes exhibit the highest rate of catalysis amongst P450 monooxygenases due to the efficient electron transfer between the fused reductase and heme domains, see e.g., (Noble MA 1999); and (Munro 1996).

[0005] BM3 variants have been described for various biotransformation processes. Wild-type and mutant P450 BM3 were applied as biocatalysts in the production of chemicals, including pharmaceuticals (Hazel M Girvan 2016). For example, (WO200107630A1) discloses processes for the microbiological oxidation of different organic substrates, such as N-heterocyclic aromatic compounds, particularly methods for the preparation of indigo and indian ruby using special cytochrome P450-monooxygenases with altered substrate specificity. (EP1196603A1) claims a P450 BM3 variant with an altered profile in enzymatic hydroxylation of aliphatic carboxylic acids, owing to site-specific mutagenesis of its substrate-binding region, wherein F87 is replaced by Val, Ala or Leu, and L188 is replaced by Asn, Gln, Arg, Lys, Ala, Gly, Ser or Trp, and optionally at least one of amino acid positions 26, 47, 72, 74 and 354 is altered. (WO2016007623A1) discloses cytochrome P450 BM3 variants to obtain improved activity with regard to substrates selected from nifedipine, propranolol, verapamil and diclofenac. (EP1131440A2) discloses a process for oxidising a substrate which is an acyclic or cyclic terpene selected from monoterpenes, sesquiterpenes and diterpenes, or a cycloalkene; or a substituted derivative thereof, which process comprises oxidising said compound with a mutant P450 BM3 enzyme, the mutant comprising the substitution of an amino acid in the active site by an amino acid with a less polar side-chain.

[0006] None of the mentioned documents discloses the specific structure of the BM3 variants according to the current invention. Furthermore, none of the above indicated documents relates to the C19 hydroxylation of steroid derivatives, e.g. for the production of estradiol or estrone. Instead it has been described that BM3 wildtype (WT) does not accept testosterone nor steroids in general as a substrate.

[0007] (Kille Sabrina 2011), (Kille 2010) and (Acevedo-Rocha 2018) have described a library of P450 BM3 variants and the use of directed evolution of P450 BM3. Acevedo-Rocha et al. have reported the directed evolution of P450 BM3 for the selective hydroxylation of testosterone. With the resulting mutants, however, relevant amounts of hydroxylation of testosterone were obtained only at positions 16α/β. These findings discouraged further developments of BM3 variants for C19 hydroxylation, because there was a prejudice to obtain only trace amounts at the position C19 due to preferential hydroxylation at other positions (Acevedo-Rocha 2018).

[0008] According to the current invention it was nevertheless surprisingly found that specific novel variants of bacterial cytochrome P450 BM3 monooxygenases (CYPs) can be used to catalyze the efficient synthesis of estrone and estradiol and their derivatives through C19-hydroxylation, also in an efficient and commercially exploitable way. In particular, it was surprisingly found that C19-hydroxylation of substrates testosterone, delta-1-testosterone and androsta-1,4-dien-3,17-dione can be achieved using mutants of bacterial cytochrome P450 BM3 monooxygenases as biocatalysts.

[chemical structure]

[chemical structure]

[0009] These uses can be further supported by incorporating mutations into the BM3 varaints which improve the protein expression of BM3.

### SUMMARY

[0010] According to a first aspect of the invention there is provided a Cytochrome P450 BM3 monooxygenase (BM3) variant for catalyzing the C19 hydroxylation of a steroid or steroid derivative. According to a first embodiment of the first aspect, the BM3 variant comprises the mutation F87A and at least one and preferably two further mutations selected from (i) a mutation at position V78, preferably V78F, V78Y, V78M, V78l or V78L, (ii) a mutation at position A82, preferably A82E, A82Q or A82P. According to a second aspect of the current invention, there is provided a nucleic acid encoding for a Cytochrome P450 BM3 monooxygenase variant as described herein. According to a third aspect of the current invention, there is provided a host cell for the production of a Cytochrome P450 BM3 monooxygenase variant. In a preferred embodiment, the host cell comprises a nucleic acid encoding for a BM3 variant according to any of the aspects dercribed herein. According to a fourth aspect of the current invention, there is provided the use of a Cytochrome P450 BM3 monooxygenase (BM3) variant for the production of a compound according to formula I, wherein R1 and R2 form a six-membered ring as part of a steroid.

[chemical structure]

[0011] According to a fifth aspect of the current invention, there is provided the use of a BM3 variant for the C19-hydroxylation of a steroid or steroid derivative. According to a sixth aspect of the current invention, there is provided a process for C19-hydroxylation of a steroid or derivative thereof comprising (i) (a) culturing a recombinant Cytochrome P450 BM3 monooxygenase (BM3) variant producing microorganism in a culture medium, in the presence of an exogenous or intermediately formed substrate; or (b) incubating a substrate-containing reaction medium with a Cytochrome P450 BM3 monooxygenase; and (ii) isolating the oxidation product formed, or a secondary product thereof, from the medium; said process being further characterized in that said BM3 variant is a BM3 variant as described herein. According to a seventh aspect there is provided a method for obtaining optimized BM3 variants for the C19 hydroxylation of steroids, said method comprising (i) (a) culturing a recombinant microorganism expressing a BM3 variant (test variant) in a culture medium, in the presence of an exogenous or intermediately formed steroid or steroid derivative; or (b) incubating a steroid or steroid derivative-containing reaction medium with a BM3 variant (test variant); and (ii) comparing the obtained product yield and/or selectiviy for the C19 hydroxylation product formed by the test variant or a secondary product thereof with the respective value obtained for a parent variant of the test variant capable of catalyzing the C19 hydroxylation of a steroid, and (iii) selecting the test variant as optimized for the C19 hydroxylation of steroids, if the test variant has an improved product yield/and or selectivity compared to the parent variant. According to a further aspect, there are provided BM3 variants characterized by an improved BM3 protein expression relative to BM3 wildtype (WT), wherein the BM3 variant comprise specific mutations.

### BRIEF DESCRIPTION OF THE DRAWINGS

[0012] FIG. 1a shows the estradiol yield obtained in biotransformation reactions for BM3-268 daughter variants. The estradiol yield (from 50 mg/L Δ1-testosterone as substrate) is given as ratio to the parent type. In comparison with the parent type, estradiol yields could be further improved by introducing mutations at positions V26, L29, R47, V48, T49, R50, Y51, E64, N70, S72, A74, L75, F77, L78, F81, G85, L86, T88, S89, W90, M118, E143, T146, S176, M177, V178, L181, A184, M185, L188, K224, R255, F261, L262, I263, A264, H266, E267, T268, V314, A321, W325, T327, P329, A330, T365, P392, F393, A399, I401, G402, G415, L437, T438.

[0013] FIG. 1b shows the selectivity factor for estradiol obtained in biotransformation reactions for BM3-268 daughter variants. The selectivity factor (from 50 mg/L Δ1-testosterone as substrate) is given as ratio to the parent type. In comparison with the parent type, selectivity factors could be further improved by introducing mutations at positions V26, L29, R47, V48, T49, R50, Y51, E64, N70, S72, A74, L75, F77, L78, F81, G85, L86, T88, S89, W90, M118, E143, T146, S176, M177, V178, L181, A184, M185, L188, K224, R255, F261, L262, I263, A264, H266, E267, T268, V314, A321, W325, T327, P329, A330, T365, P392, F393, A399, I401, G402, G415, L437, T438.

[0014] FIG. 1c shows Δ1-testosterone to estradiol conversion obtained in biotransformation reactions (50 mg/L Δ1-testosterone as substrate) with BM3-268 (SEQ ID No. 5) variants, wherein the positions L78, E82 and A87 have been altered. Estradiol was obtained with BM3-268 and variants L78[I, L, M, V] of BM3-268.

[0015] FIGS. 2a, b show the estradiol product yield (a) and selectivity factor (b), respectively, obtained in biotransformation reactions with BM3-268 (SEQ ID No. 5) variants comprising the depicted double mutations. Both estradiol yield (from 50 mg/L Δ1-testosterone as substrate) and selectivity factor are given as ratio to the parent type. Variants having an improved yield or selectivity factor compared to BM3-268 are depicted in grey. In comparison with the BM3-268 parent variant, product yields could be further improved by introducing the following mutations: (S72C, A74[C, I, L, V]), (S72D, A74C), (S72G, A74[C, F, H, I, L, S, V, Y]), (S72H, A74C), (S72N, A74[C, I, V]), (L75I, F81[C, I, L, S, V]), (L75V, F81[C, L, V, Y]), (I263H, A264G), (A74[C, R, V], L75V). In comparison with the BM3-268 parent variant, selectivity factors could be further improved by introducing the following mutations: (S72C, A74[C, I, L, V, Y]), (S72D, A74[C, F]), (S72G, A74[C, F, H, I, L, S, V, Y]), (S72H, A74[C, G, S, Y]), (S72N, A74[C, I, N, V]), (S72Y, A74V), (L75H, F81S), (L75I, F81[C, G, H, I, L, S, V, Y]), (L75V, F81[C, H, I, L, V, Y]), (I263H, A264G), (A74G, L75C), (A74[C, R, V], L75V).

[0016] FIGS. 3a, b show the estradiol product yield (a) and selectivity factor (b), respectively, obtained in biotransformation reactions with variants of BM3-268; M177Y, A184Y (SEQ ID No. 15) and further mutations as depicted. Both, estradiol yield and selectivity factor (from 100 mg/L Δ1-testosterone as substrate) are given as ratio to the parent type. Variants of SEQ ID No. 15 comprising an additional mutation at position L20, V26, L29, R47, T49, L78, T146, L150, F173, F205, M212, H266, E267, G271, L272, W325, T327, A330, F331, E352, and/or T438 were surprisingly found to have a further improved product yield compared with the parent variant according to SEQ ID No. 15. Variants of SEQ ID No. 15 comprising an additional mutation at position L20, V26, L29, R47, T49, A74, L78, F81, E82, L86, T88, T146, L150, F205, M212, I259, F261, E267, L272, W325, T327, A330, F331, E352, M354, L356, and/or T438 were surprisingly found to have an improved selectivity compared with the parent variant according to SEQ ID No. 15.

[0017] FIG. 3c shows Δ1-testosterone to estradiol conversion obtained in biotransformation reactions with 100 mg/L Δ1-testosterone as substrate, using BM3-268; M177Y, A184Y (SEQ ID No. 15) and comprising mutation(s) at position L78, E82 or A87 as specified. Estradiol was obtained with the variant having the SEQ ID No. 15. Furthermore, estradiol was obtained with SEQ ID No. 15 derived variants comprising at least mutation(s) L78[L, F, M, Y] or E82[E, P, Q], or combinations thereof.

[0018] FIGS. 4a, b, c, d, e, f show product yield and selectivity factor for estradiol obtained in biotransformation reactions with BM3-268; M177Y, A184Y (SEQ ID No. 15) variants (Var) having up to six mutations. 100 mg/L Δ1-testosterone were used as substrate. Each variant was compared to BM3-268 (SEQ ID No. 5) and improved variant BM3-268; M177Y, A184Y (PT) (SEQ ID No. 15), respectively. Furthermore, the last two columns show whether a variant (having the depicted set of mutations) was improved in yield or selectivity (SF) compared to the best analyzed variant (best) from a set of variants comprising the same subset of mutations but at least one mutation less.

[0019] FIGS. 5a and b show estradiol product yield and selectivity factor (SF) obtained in biotransformation reactions with BM3-268 variants having up to seven mutations. 50 mg/L Δ1-testosterone were used as substrate. Each variant was compared to BM3-268 (SEQ ID No. 5) with regard to product yield and selectivity factor (columns 1 and 2). Furthermore, columns 3 and 4 show whether a variant (having the depicted set of mutations) was improved in yield or selectivity (SF) compared to the best analyzed variant (best) from a set of variants comprising the same subset of mutations but at least one mutation less.

[0020] FIGS. 6a and b show product yield (a) and selectivity factor (b), respectively, for estrone obtained in biotransformation reactions with BM3-268; M177Y, A184Y (SEQ ID No. 15) variants having the depicted mutations. Estrone yield/selectivity factor from 100 mg/L ADD as substrate is given as ratio to the parent type (SEQ ID No. 15). In comparison with the parent type, estrone yields could be further improved by introducing mutations at positions L20, V26, R47, T49, Y51, A74, L78, F81, E82, T146, L150, F205, M212, I259, G271, L272, W325, T327, A330, E352, M354, T436 and/or T438. Selectivity factors could be further improved in comparison to the parent type by introducing mutations at positions L20, V26, T49, A74, L78, F81, T146, L150, F173, F205, M212, I259, F261, I263, H266, E267, G271, L272, W325, T327, E352, M354, L356 and/or T438.

[0021] FIG. 6c shows ADD to estrone conversion obtained in biotransformation reactions with 100 mg/L ADD as substrate using BM3-268; M177Y, A184Y (SEQ ID No. 15) variants having a mutation at position L78, E82 or A87. Estrone was obtained with the variant having SEQ ID No. 15 and variants L78[M], E82[P] of SEQ ID No. 15.

[0022] FIGS. 7a, b, c, d, e, f show product yield and selectivity factor for estrone obtained in biotransformation reactions with BM3-268; M177Y, A184Y (SEQ ID No. 15) variants (Var) having up to six mutations. 100 mg/L ADD were used as substrate. Each variant was compared to BM3-268 (SEQ ID No. 5) and improved variant BM3-268; M177Y, A184Y (PT) (SEQ ID No. 15). Furthermore, the last two columns show whether a variant (having the depicted set of mutations) was improved in yield or selectivity (SF) compared to the best analyzed variant (best) from a set of variants comprising the same subset of mutations but at least one mutation less.

[0023] FIG. 8 shows product yield and selectivity (SF) for estrone obtained in biotransformation reactions with BM3-268 variants having multiple mutations. 100 mg/L ADD were used as substrate. Each variant was compared to BM3-268 (SEQ ID No. 5) with regard to product yield and selectivity (columns 1 and 2). Furthermore, columns 3 and 4 show whether a variant (having the depicted set of mutations) was improved in yield or selectivity (SF) compared to the best analyzed variant (best) from a set of variants comprising the same subset of mutations but at least one mutation less.

[0024] FIGS. 9 and 10 show product titer (A) and target product ratio (B), respectively, for estrone obtained in biotransformation reactions with BM3-268; S72G, V78L, A82E, F87A, M177Y, V178P, L181Y, A184Y, L188F (SEQ ID No. 117) variants having the depicted mutations. Estrone titer/selectivity factor from 2000 mg/L ADD as substrate is given as ratio to the parent type (SEQ ID No. 117). In comparison with the parent type, estrone titers could be further improved by introducing mutations at positions M5, A44, S53, Q73, K76, R79, D80, H92, G114, E140, P172, F173, I174, T175, S176, R179, D182, E183, N186, K187, Q189, R190, A225, G227, H236, G240, I258, T269, S270, V299, E337, Q397, A399, Q403, Q404 and/or K440. Selectivity could be further improved in comparison to the parent type by introducing mutations at positions M5, A44, G46, S53, Q73, K76, R79, H92, G114, E140, P172, F173, I174, T175, S176, R179, D182, E183, N186, K187, Q189, R190, A225, H236, G240, I258, T269, S270, V299, E337, A399, Q403, Q404, E409 and/or K440.

[0025] FIG. 11 shows product titer and the target product ratio (TPR) for estrone obtained in biotransformation reactions with BM3-268; S72G, V78L, A82E, F87A, M177Y, V178P, L181Y, A184Y, L188F (SEQ ID No. 117) variants having multiple mutations. 2000 mg/L ADD were used as substrate. Columns 1 and 2 show whether a variant (having the depicted set of mutations) was improved in product titer or selectivity compared to the best analyzed variant from a set of variants comprising the same subset of depicted mutations but at least one mutation less.

### BRIEF DESCRIPTION OF THE SEQUENCE IDS

[0026] The Sequence Listing associated with this application is filed in electronic format and hereby incorporated by reference into the specification in its entirety.

| SEQ ID NO. | SUBJECT | MUTATIONS | TYPE |
|---|---|---|---|
| 1 | BM3 WT | | PRT |
| 2 | BM3-254 | V78Y, A82E, F87A | PRT |
| 3 | BM3-261 | V78M, A82E, F87A | PRT |
| 4 | BM3-263 | V78I, A82E, F87A | PRT |
| 5 | BM3-268 | V78L, A82E, F87A | PRT |
| 6 | BM3 variant | V78Y, A82P, F87A | PRT |
| 7 | BM3 variant | V78M, A82P, F87A | PRT |
| 8 | BM3 variant | V78I, A82P, F87A | PRT |
| 9 | BM3 variant | V78L, A82P, F87A | PRT |
| 10 | BM3 variant | V78Y, A82Q, F87A | PRT |
| 11 | BM3 variant | V78M, A82Q, F87A | PRT |
| 12 | BM3 variant | V78I, A82Q, F87A | PRT |
| 13 | BM3 variant | V78L, A82Q, F87A | PRT |
| 14 | BM3 variant | V78F, A82E, F87A, M177Y, A184Y | PRT |
| 15 | BM3 variant | V78L, A82E, F87A, M177Y, A184Y | PRT |
| 16 | BM3 variant | V78I, A82E, F87A, M177Y, A184Y | PRT |
| 17 | BM3 variant | V78M, A82E, F87A, M177Y, A184Y | PRT |
| 18 | BM3 variant | V78Y, A82E, F87A, M177Y, A184Y | PRT |
| 19 | BM3 variant | V78F, A82P, F87A, M177Y, A184Y | PRT |
| 20 | BM3 variant | V78L, A82P, F87A, M177Y, A184Y | PRT |
| 21 | BM3 variant | V78I, A82P, F87A, M177Y, A184Y | PRT |
| 22 | BM3 variant | V78M, A82P, F87A, M177Y, A184Y | PRT |
| 23 | BM3 variant | V78Y, A82P, F87A, M177Y, A184Y | PRT |
| 24 | BM3 variant | V78F, A82Q, F87A, M177Y, A184Y | PRT |
| 25 | BM3 variant | V78L, A82Q, F87A, M177Y, A184Y | PRT |
| 26 | BM3 variant | V78I, A82Q, F87A, M177Y, A184Y | PRT |
| 27 | BM3 variant | V78M, A82Q, F87A, M177Y, A184Y | PRT |
| 28 | BM3 variant | V78Y, A82Q, F87A, M177Y, A184Y | PRT |
| 29 | BM3 variant | V78F, A82E, F87A, M177Y | PRT |
| 30 | BM3 variant | V78L, A82E, F87A, M177Y | PRT |
| 31 | BM3 variant | V78I, A82E, F87A, M177Y | PRT |
| 32 | BM3 variant | V78M, A82E, F87A, M177Y | PRT |
| 33 | BM3 variant | V78Y, A82E, F87A, M177Y | PRT |
| 34 | BM3 variant | V78F, A82P, F87A, M177Y | PRT |
| 35 | BM3 variant | V78L, A82P, F87A, M177Y | PRT |
| 36 | BM3 variant | V78I, A82P, F87A, M177Y | PRT |
| 37 | BM3 variant | V78M, A82P, F87A, M177Y | PRT |
| 38 | BM3 variant | V78Y, A82P, F87A, M177Y | PRT |
| 39 | BM3 variant | V78F, A82Q, F87A, M177Y | PRT |
| 40 | BM3 variant | V78L, A82Q, F87A, M177Y | PRT |
| 41 | BM3 variant | V78I, A82Q, F87A, M177Y | PRT |
| 42 | BM3 variant | V78M, A82Q, F87A, M177Y | PRT |
| 43 | BM3 variant | V78Y, A82Q, F87A, M177Y | PRT |
| 44 | BM3 variant | V78F, A82E, F87A, A184Y | PRT |
| 45 | BM3 variant | V78L, A82E, F87A, A184Y | PRT |
| 46 | BM3 variant | V78I, A82E, F87A, A184Y | PRT |
| 47 | BM3 variant | V78M, A82E, F87A, A184Y | PRT |
| 48 | BM3 variant | V78Y, A82E, F87A, A184Y | PRT |
| 49 | BM3 variant | V78F, A82P, F87A, A184Y | PRT |
| 50 | BM3 variant | V78L, A82P, F87A, A184Y | PRT |
| 51 | BM3 variant | V78I, A82P, F87A, A184Y | PRT |
| 52 | BM3 variant | V78M, A82P, F87A, A184Y | PRT |
| 53 | BM3 variant | V78Y, A82P, F87A, A184Y | PRT |
| 54 | BM3 variant | V78F, A82Q, F87A, A184Y | PRT |
| 55 | BM3 variant | V78L, A82Q, F87A, A184Y | PRT |
| 56 | BM3 variant | V78I, A82Q, F87A, A184Y | PRT |
| 57 | BM3 variant | V78M, A82Q, F87A, A184Y | PRT |
| 58 | BM3 variant | V78Y, A82Q, F87A, A184Y | PRT |
| 59 | WT | | NUC |
| 60 | BM3-254 | V78Y, A82E, F87A | NUC |
| 61 | BM3-261 | V78M, A82E, F87A | NUC |
| 62 | BM3-263 | V78I, A82E, F87A | NUC |
| 63 | BM3-268 | V78L, A82E, F87A | NUC |
| 64 | BM3 variant | V78Y, A82P, F87A | NUC |
| 65 | BM3 variant | V78M, A82P, F87A | NUC |
| 66 | BM3 variant | V78I, A82P, F87A | NUC |
| 67 | BM3 variant | V78L, A82P, F87A | NUC |
| 68 | BM3 variant | V78Y, A82Q, F87A | NUC |
| 69 | BM3 variant | V78M, A82Q, F87A | NUC |
| 70 | BM3 variant | V78I, A82Q, F87A | NUC |
| 71 | BM3 variant | V78L, A82Q, F87A | NUC |
| 72 | BM3 variant | V78F, A82E, F87A, M177Y, A184Y | NUC |
| 73 | BM3 variant | V78L, A82E, F87A, M177Y, A184Y | NUC |
| 74 | BM3 variant | V78I, A82E, F87A, M177Y, A184Y | NUC |
| 75 | BM3 variant | V78M, A82E, F87A, M177Y, A184Y | NUC |
| 76 | BM3 variant | V78Y, A82E, F87A, M177Y, A184Y | NUC |
| 77 | BM3 variant | V78F, A82P, F87A, M177Y, A184Y | NUC |
| 78 | BM3 variant | V78L, A82P, F87A, M177Y, A184Y | NUC |
| 79 | BM3 variant | V78I, A82P, F87A, M177Y, A184Y | NUC |
| 80 | BM3 variant | V78M, A82P, F87A, M177Y, A184Y | NUC |
| 81 | BM3 variant | V78Y, A82P, F87A, M177Y, A184Y | NUC |
| 82 | BM3 variant | V78F, A82Q, F87A, M177Y, A184Y | NUC |
| 83 | BM3 variant | V78L, A82Q, F87A, M177Y, A184Y | NUC |
| 84 | BM3 variant | V78I, A82Q, F87A, M177Y, A184Y | NUC |
| 85 | BM3 variant | V78M, A82Q, F87A, M177Y, A184Y | NUC |
| 86 | BM3 variant | V78Y, A82Q, F87A, M177Y, A184Y | NUC |
| 87 | BM3 variant | V78F, A82E, F87A, M177Y | NUC |
| 88 | BM3 variant | V78L, A82E, F87A, M177Y | NUC |
| 89 | BM3 variant | V78I, A82E, F87A, M177Y | NUC |
| 90 | BM3 variant | V78M, A82E, F87A, M177Y | NUC |
| 91 | BM3 variant | V78Y, A82E, F87A, M177Y | NUC |
| 92 | BM3 variant | V78F, A82P, F87A, M177Y | NUC |
| 93 | BM3 variant | V78L, A82P, F87A, M177Y | NUC |
| 94 | BM3 variant | V78I, A82P, F87A, M177Y | NUC |
| 95 | BM3 variant | V78M, A82P, F87A, M177Y | NUC |
| 96 | BM3 variant | V78Y, A82P, F87A, M177Y | NUC |
| 97 | BM3 variant | V78F, A82Q, F87A, M177Y | NUC |
| 98 | BM3 variant | V78L, A82Q, F87A, M177Y | NUC |
| 99 | BM3 variant | V78I, A82Q, F87A, M177Y | NUC |
| 100 | BM3 variant | V78M, A82Q, F87A, M177Y | NUC |
| 101 | BM3 variant | V78Y, A82Q, F87A, M177Y | NUC |
| 102 | BM3 variant | V78F, A82E, F87A, A184Y | NUC |
| 103 | BM3 variant | V78L, A82E, F87A, A184Y | NUC |
| 104 | BM3 variant | V78I, A82E, F87A, A184Y | NUC |
| 105 | BM3 variant | V78M, A82E, F87A, A184Y | NUC |
| 106 | BM3 variant | V78Y, A82E, F87A, A184Y | NUC |
| 107 | BM3 variant | V78F, A82P, F87A, A184Y | NUC |
| 108 | BM3 variant | V78L, A82P, F87A, A184Y | NUC |
| 109 | BM3 variant | V78I, A82P, F87A, A184Y | NUC |
| 110 | BM3 variant | V78M, A82P, F87A, A184Y | NUC |
| 111 | BM3 variant | V78Y, A82P, F87A, A184Y | NUC |
| 112 | BM3 variant | V78F, A82Q, F87A, A184Y | NUC |
| 113 | BM3 variant | V78L, A82Q, F87A, A184Y | NUC |
| 114 | BM3 variant | V78I, A82Q, F87A, A184Y | NUC |
| 115 | BM3 variant | V78M, A82Q, F87A, A184Y | NUC |
| 116 | BM3 variant | V78Y, A82Q, F87A, A184Y | NUC |
| 117 | BM3 variant | S72G, V78L, A82E, F87A, M177Y, V178P, L181Y, A184Y, L188F | PRT |
| 118 | BM3 variant | S72G, V78L, A82E, F87A, T146F, M177Y, V178W, L181Y, A184Y | PRT |
| 119 | BM3 variant | S72G, V78L, A82E, F87A, T146F, M177Y, V178W, L181Y, A184Y, G457S, I458G, A477N | PRT |
| 120 | BM3 variant | S72G, V78L, A82E, F87A, M177Y, V178P, L181Y, A184Y, L188F | NUC |
| 121 | BM3 variant | S72G, V78L, A82E, F87A, T146F, M177Y, V178W, L181Y, A184Y | NUC |
| 122 | BM3 variant | S72G, V78L, A82E, F87A, T146F, M177Y, V178W, L181Y, A184Y, G457S, I458G, A477N | NUC |
| 123 | Insert | GKHIIQGPMYDVSGTAPVNVTN | PRT |
| 124 | Insert | LRASVSAIQQTTKQIYDDQSLVNV | PRT |
| 125 | Insert | AASKPEFIKPEDVSAEVVEKEYQVQL | PRT |
| 126 | Insert | AKKPLNTEGVM KSRSN | PRT |
| 127 | Insert | SAAAATPAVRTVPQYKYAAGVRNPQQHLNAQPQV TMQQPAVHVQGQEPL | PRT |
| 128 | Insert | TVHFESFGATNTNARENTPF | PRT |
| 129 | Insert | ENPGVTQLNRLAAHPPFAS | PRT |
| 130 | Insert | VKMVRVQAIEKNRYRA | PRT |
| 131 | Insert | VREALLRRQRAFRELPG | PRT |
| 132 | Insert | IRPRAIGGSKPRVA | PRT |
| 133 | Insert | DETYVPKEFNAETF | PRT |
| 134 | Insert | WQYTAATATPTIGHV | PRT |
| 135 | Insert | ARKLLSPEVAND | PRT |
| 136 | Insert | VQTPGHANQSMMPQFIMPANNQFSAQ | PRT |
| 137 | Insert | GGGGSGGGGSGGGGSGGGGS | PRT |
| 138 | Insert | GGGGSGGGGSGGGGS | PRT |
| 139 | Insert | APAPAPAPAPAPAPAP | PRT |
| 140 | Insert | PSTEQSAKKVRKKAEN | PRT |
| 141 | Insert | PSPSTEQSKVRKKAEN | PRT |
| 142 | Insert | PSPSTEQSAKKVR | PRT |
| 143 | Insert | TKLPEAQQRVGGCFLNLMPQMKTLYLTYCANHPSAVNVL | PRT |
| 144 | Insert | GNVPELPDTTEHSRTDL | PRT |
| 145 | Insert | TARKGKGAFCNGQKLQV | PRT |
| 146 | Insert | PSDNVDAQLYNGFFSDAD | PRT |
| 147 | Insert | AMSLYLAGEISLLI LDEPT | PRT |
| 148 | Insert | GCAWYELM PAETTVRLRA | PRT |
| 149 | Insert | LSLEVAEEIARLEAEV | PRT |
| 150 | Insert | ASSYTAPQPGLG | PRT |
| 151 | Insert | IPVPTRDLEKPF | PRT |
| 152 | Insert | VIGYMPIPVGVA | PRT |
| 153 | Insert | RGRWMARLARM | PRT |
| 154 | Insert | FLMKLINRPII | PRT |
| 155 | Insert | LSPDEAP | PRT |
| 156 | Insert | VEPPDL | PRT |
| 157 | Insert | FITPII | PRT |
| 158 | Insert | LRKMRTGKP | PRT |
| 159 | Insert | SNSTMKKHGR | PRT |
| 160 | Insert | YLSITFL | PRT |
| 161 | Insert | AAAEKNVPLY | PRT |
| 162 | Insert | SEFEDPLV | PRT |
| 163 | Insert | KRSPW | PRT |
| 164 | Insert | NASCT | PRT |
| 165 | Insert | IQRKK | PRT |
| 166 | Insert | EDSGF | PRT |
| 167 | Insert | FVGVL | PRT |
| 168 | Insert | GGGGSGGGGS | PRT |
| 169 | Insert | GGGGS | PRT |
| 170 | Insert | PAPAP | PRT |
| 171 | Insert | PSPSTEVRKKAEN | PRT |
| 172 | Insert | PSPSTKKAEN | PRT |
| 173 | Insert | PEN | PRT |

### DETAILED DESCRIPTION

### DEFINITIONS

[0027] Unless otherwise defined, all scientific and technical terms used in the description, figures and claims have their ordinary meaning as commonly understood by one of ordinary skill in the art. All publications, patent applications, patents, and other references mentioned herein are incorporated by reference in their entirety. In case of conflict, the present specification, including definitions, will prevail. If two or more documents incorporated by reference include conflicting and/or inconsistent disclosure with respect to each other, then the document having the later effective date shall control. The materials, methods, and examples are illustrative only and not intended to be limiting. Unless stated otherwise, the following terms used in this document, including the description and claims, have the definitions given below.

[0028] The terms “comprising”, “including”, “containing”, “having” etc. shall be read expansively or open-ended and without limitation. Singular forms such as “a”, “an” or “the” include plural references unless the context clearly indicates otherwise. Unless otherwise indicated, the term “at least” preceding a series of elements is to be understood to refer to every element in the series. The terms “at least one” and “at least one of” include for example, one, two, three, four, five, six, seven, eight, nine, ten or more elements.

[0029] It is furthermore understood that slight variations above and below a stated range can be used to achieve substantially the same results as a value within the range. Also, unless indicated otherwise, the disclosure of ranges is intended as a continuous range including every value between the minimum and maximum values.

[0030] Where protein or amino acid sequences are provided throughout the application it is also understood by the skilled person that single or multiple amino acids may be exchanged by amino acids with similar properties to achieve substantially the same effect, i.e.an equivalent result. The skilled person furthermore knows that a defined protein or amino acid sequence may be encoded by various nucleic acid sequences. For a given amino acid sequence as defined herein, each of the countable nucleic acid sequences encoding the specific amino acid sequence shall be deemed to be disclosed herein. Where nucleic acid sequences are provided throughout the application it is furthermore understood that silent mutations may be introduced.

[0031] The terms “peptide”, “polypeptide”, and “protein” are used interchangeably herein, and refer to a compound which comprises at least two amino acid residues covalently linked by at least one peptide bond. No limitation is placed on the maximum number of amino acids that can comprise a peptide’s sequence. A “peptide” may comprise without limitation modified amino acids, non naturally-occuring amino acids and/or D amino acids. Unless otherwise indicated, a particular peptide sequence also encompasses variants wherein at least one amino acid has been replaced by an amino acid which is characterized by similar structural properties. A “peptide” may be a natural peptide, a recombinant peptide, a synthetic peptide, or a combination thereof. A “peptide” may be, for example, a biologically active fragment, an oligopeptide, a homodimer, a heterodimer, a peptide variant, a modified peptide, a peptide derivative, a peptide analog, a fusion protein, among others.

[0032] The term “amino acid” or “amino acid residue” (“aa”) as used herein typically refers to a naturally-occuring amino acid but may also refer to a non naturally-occuring amino acid. The term typically refers to an L-amino acid but may also encompass a D-amino acid. An amino acid may or may not be modified as described elsewhere herein. The one letter code is used herein to refer to the respective amino acid. As used herein, a “charged amino acid” is an amino acid which is negatively charged or positively charged. “Negatively charged amino acids” are aspartic acid (D) and glutamic acid (E). “Positively charged amino acids” are arginine (R) lysine (K) and histidine (H). “Polar amino acids” are all amino acids that form hydrogen bonds as donors or acceptors. These are all charged amino acids and asparagine (N), glutamine (Q), serine (S), threonine (T), tyrosine (Y) and cysteine (C). “Polar uncharged amino acids” are asparagine (N), glutamine (Q), serine (S), threonine (T), tyrosine (Y) and cysteine (C). “Amphiphatic amino acids” are tryptophan (W), tyrosine (Y) and methionine (M). “Aromatic amino acids” are phenylalanine (F), tyrosine (Y), and tryptophan (W). “Hydrophobic amino acids” are glycine (G), alanine (A), valine (V), leucine (L), isoleucine (I), proline (P), phenylalanine (F), methionine (M) and cysteine. “Small amino acids” are glycine (G), alanine (A), serine (S), proline (P), threonine (T), aspartic acid (D) and asparagine (N). Two amino acids are “characterized by similar structural properties” if (a) both are charged amino acids, preferably both are negatively charged amino or both are positively charged amino acids, (b) both are polar amino acids, (c) both are polar uncharged amino acids, (d) both are amphiphatic amino acids, (e) both are aromatic amino acids, (f) both are hydrophobic amino acids, or (g) both are small amino acids. As understood by the skilled person, where an amino acid sequence is provided throughout the disclosure, amino acids characterized by similar structural properties may be exchanged with each other to achieve substantially the same or an equivalent result.

[0033] The terms “cytochrome P450 BM3 monooxygenase”, “cytochrome P450-BM3”, “P450-BM3” (also BM3, BM-3) refer to the cytochrome P450 enzyme obtained from Bacillus megaterium that catalyzes the hydroxylation of long-chain fatty acids, alcohols, and amides, as well as the epoxidation of unsaturated fatty acids. Without being bound by theory, P450-BM3 is naturally expressed by Bacillus megaterium strains ATCC 14581, DSM 32, JCM 2506, NBRC 15308, NCIMB 9376, NCTC 10342, VKM B-512. Alternative names comprise “Bifunctional cytochrome P450/NADPH--P450 reductase”. The P450-BM3 protein is encoded by the gene cyp102A1. Sequence(s) are accessible via UniProt Identifier P14779 (CPXB_BACMB). Different isoforms and variants may exist for the different strains and are all comprised by the term. Where a specific mutation can be exchanged without changing the described catalytic properties of the intitial sequence, it is clear that the sequence having such a functionally silent mutation is equivalent with regard to the initial sequence. In addition, the protein may furthermore be subject to various modifications, e.g, synthetic or naturally occurring modifications.

[0034] The gene encoding the cytochrome P450-monooxygenases (P450-BM3) from Bacillus megaterium was originally amplified from genomic DNA by PCR and subsequently cloned using restriction endonucleases Ncol and Sacl into the polylinker sequence of plasmid pETM11, resulting in pETM11-BM3 (Kille 2010). This procedure adds a hexa-histidine tag and an 18 amino acid linker sequence to the N-terminus of the resulting protein, which is however not essential for function. Introducing the Ncol site at the 5′ end of the gene sequence resulted in alteration of the second codon of the P450-BM3 gene and to an amino acid exchange in the resulting protein (T1A).

[0035] An amino acid position is typically given by specifying the number of the respective position behind the amino acid of the wildtype using the one letter code (e.g. V78 where the wildtype has a valine at position 78). A list of comma separated letters in squared brackets specifies the mutation or amino acid exchange. For example, where at position 78 of the wildtype variant the valine is replaced by any one of isoleucine, leucine, or methionine, or is not mutated at all, this is abbreviated as V78[I, L, M, V].

[0036] Throughout this application counting of amino acid positions of the P450-BM3 amino acid sequence starts with the first amino acid that appears in the protein sequence underlying the crystal structure of a P450-BM3 variant (PDB ID: 2UWH) that was used for designing protein libraries. This is also common practice in P450-BM3-related literature, see e.g. (Kille 2010), (Kille Sabrina 2011), (Acevedo-Rocha 2018). The N-terminal methionine is ignored such that counting starts with threonine 1, which was converted to an alanine in the cloning process of pETM11-BM3 and which is codon 28 according to the SEQ IDs listed herein.

[0037] The term “P450-BM3 variant” refers to a P450-BM3 comprising at least one mutation relative to the wildtype sequence. In particular, the term refers to proteins having at least 60%, 70%, 80% or 90% sequence identity with the P450-BM3 wildtype (SEQ ID No. 1). Preferably, P450-BM3 variants are functional, i.e. catalytically active with regard to at least one substrate. Where mutations of a variant are specified, these mutations are restrictive, i.e. a BM3-268; M177Y, A184Y (SEQ ID No. 15) variant having up to six mutations is required to have the mutations M177Y and A184Y.

[0038] A “daughter variant” of a “parent variant” is a variant having the sequence of its parent variant and at least one further mutation. A daughter variant can have multiple parent variants.

[0039] According to the IUPAC definition “steroids” are naturally occurring compounds and synthetic analogues, which are based on the cyclopenta[a]phenanthrene carbon skeleton, and can be partially or completely hydrogenated. Usually but not necessarily, there are methyl groups at C-10 and C-13, and often but not necessarily there is an alkyl group at C-17. By extension, one or more bond scissions, ring expansions and/or ring contractions of the skeleton may or may not have occurred (IUPAC kein Datum). Throughout this application, steroids are numbered and rings are lettered as in the following formula:

[chemical structure]

[0040] When the rings of a steroid are denoted as projections onto the plane of the paper, the formula is normally to be oriented as in the follwing formula:

[chemical structure]

[0041] An atom or group attached to a ring depicted as in this orientation is termed “alpha” if it lies below the plane of the paper or “beta” if it lies above the plane of the paper. Examples for steroids include androgens, estrogens, and progestogens, corticosteroids, glucocorticoids, mineralocorticoids, cholesterol, estradiol, testosterone, dexamethasone, lanosterol, progesterone, medrogestone, β-sitosterol.

[0042] The term steroid derivative refers to molecules derived from a steroid, i.e. molecules comprising a cyclopenta[a]phenanthrene carbon skeleton.

[0043] The term “C19 hydroxylation” refers to the introduction of a hydroxyl group (-OH) into a steroid or steroid derivative at the position C19.

[0044] The “selectivity” of a biotransformation process or enzyme can be determined based on the selectivity factor or target product ratio. Other methods to determine selectivity are known to the skilled person. In case of doubt the selectivity factor as defined herein shall control.

[0045] The “selectivity factor” of a reaction is a measure for the selectivity of the reaction and is calculated by dividing the measured product concentration by the consumed substrate concentration (which is the difference between the initial substrate concentration and the measured substrate concentration after the biotransformation process). Product and substrate concentration can be measured as known in the art and as described in the examples. Usual methods comprise HPLC analyses using substrate and product standards as references and for quantification. If not specified otherwise, the selectivity factor for the C19 hydroxylation of at least one steroid or derivative thereof is calculated based on the steroid or derivative thereof (for the consumed substrate concentration) and the C19 hydroxylated steroid or derivative thereof (for the product concentration). Where the C19 hydroxylated steroid is further converted into a secondary product, selectivity factor may also be calculated with regard to the commercially relevant product.

[0046] The “target product ratio” (TPR) of a reaction is calculated as integrated area (in HPLC chromatogram) for the desired product divided by the sum of all integrated areas for products. The product may be the C19 hydroxylated steroid. Where the C19 hydroxylated steroid is further converted into a secondary product, target product ratio may also be calculated with regard to the commercially relevant product. For example, with regard to the conversion from ADD to the product estrone, the area under the curve for estrone was divided by the area under the curve for all other products (i.e. not for the educt ADD). In case of doubt, reference is made to the various examples described throughout the disclosure.

[0047] The “product yield” is calculated by dividing the measured product concentration by the initial substrate concentration in the experiment. The product yield for a given P450-BM3 variant is therefore specific for a given substrate and a given product. For example, the substrate may be a steroid and the product may be the C19 hydroxylated steroid. Where the C19 hydroxylated steroid is further converted into a secondary product, product yield may also be calculated with regard to the commercially relevant product.

[0048] The “product titer” is provided in mg/L and is an alternative measure to describe the obtainable yields for a biotransformation product. If not specified elsewhere herein, product titer is determined under standard conditions as described in Example 2.

[0049] The term “nucleic acid” refers to deoxyribonucleotides or ribonucleotides and polymers thereof composed of monomers (nucleotides) containing a sugar, phosphate and a base that is either a purine or pyrimidine. For example and without limitation nucleic acids may occur in single- or double-stranded form. Unless specifically limited, the term encompasses nucleic acids containing known analogs of natural nucleotides that have similar binding properties as the reference nucleic acid and are metabolized in a manner similar to naturally occurring nucleotides. Unless otherwise indicated, a particular nucleic acid sequence also encompasses conservatively modified variants thereof (e.g., degenerate codon substitutions) and complementary sequences, as well as the sequence explicitly indicated. Specifically, degenerate codon substitutions may be achieved by generating sequences in which the third position of one or more selected (or all) codons is substituted with mixed-base and/or deoxyinosine residues (Batzer et al., (1991); Ohtsuka et al., (1985); Rossolini et al., (1994)).

[0050] “Sequence identity”, “percent identity” or “percent (%) sequence identity” describes how similar a query sequence is to a target sequence, more precisely how many characters in each sequence are identical after alignment. Sequence identity can be calculated using BLAST (basic local alignment search tool, NCBI), which performs comparisons between pairs of sequences, searching for regions of local similarity. Suitable alignment methods are known in the art, e.g. Needleman-Wunsch algorithm for global-global alignment, using BLOSUM62 matrix, with gap opening penalty of 11 and a gap extension penalty of 1. Afterwards, the pairs of aligned identical residues can be counted and then divided by the total length of the alignment (including gaps, internal as well as external) to arrive at the percent identity value.

[0051] A “host cell” is a cell that is used in to receive, maintain, reproduce and amplify a vector. A host cell can also be used to express the polypeptide encoded by the vector. The nucleic acid contained in the vector is replicated when the host cell divides, thereby amplifying the nucleic acids.

[0052] The term “expression system” refers to any protein production system known in the art and suitable for production of P450-BM3 variants according to the current invention. Suitable expression systems are well known in the art and example systems comprise E. coli strains such as DH5alpha, BL21 (DE3), or Rosetta (DE3), but also various other bacterial and non bacterial systems. Suitable expression systems include gram positive bacteria, such as Bacillus or Rhodococcus, such as Bacillus megaterium or Bacillus subtilis.

[0053] The term “vector”, as used herein, is known in the art and refers to a nucleic acid molecule capable of propagating a nucleic acid molecule to which it is linked. The term further comprises plasmids (non-viral) and viral vectors.

### EMBODIMENTS

[0054] According to a first aspect of the invention there is provided a Cytochrome P450 BM3 monooxygenase (BM3) variant for catalyzing the C19 hydroxylation of a steroid or steroid derivative.

[0055] According to a first embodiment of the first aspect, the BM3 variant comprises the mutation F87A and at least one and preferably two further mutations selected from
[0056] (i) a mutation at position V78, preferably V78F, V78Y, V78M, V78l or V78L, and
[0057] (ii) a mutation at position A82, preferably A82E, A82Q or A82P.

[0058] These BM3 may or may not comprise further mutations.

[0059] For example the mutation according to (i) can be V78F and the mutation according to (ii) can be A82E, A82Q or A82P. For example the mutation according to (i) can be V78Y and the mutation according to (ii) can be A82E, A82Q or A82P. For example the mutation according to (i) can be V78M and the mutation according to (ii) can be A82E, A82Q or A82P. For example the mutation according to (i) can be V78I and the mutation according to (ii) can be A82E, A82Q or A82P. For example the mutation according to (i) can be V78L and the mutation according to (ii) can be A82E, A82Q or A82P. For example the mutation according to (ii) can be A82E and the mutation according to (i) can be V78F, V78Y, V78M, V78l or V78L. For example the mutation according to (ii) can be A82Q and the mutation according to (i) can be V78F, V78Y, V78M, V78l or V78L. For example the mutation according to (ii) can be A82P and the mutation according to (i) can be V78F, V78Y, V78M, V78l or V78L.

[0060] The optional further mutations may comprise a mutation at positon M177 and/or A184. For example the mutations at positon M177 and/or A184 can be M177Y and/or A184Y.

[0061] Generation of enzyme variants according to the current invention may be performed as known in the art. For example, mutations can be introduced into the nucleic acid sequences which encode the BM3 wildtype or BM3 variants by any means appropriate for replacing nucleotides in nucleic acid sequences. A useful method for preparing a mutated nucleic acid sequence according to the invention and the corresponding protein comprises carrying out site-directed mutagenesis on codons encoding one or more amino acids which are selected in advance, thereby changing the selected codons in a way that they encode for different amino acids. The methods for obtaining these site-directed mutations are well known to the skilled person and widely described in the literature (in particular: (McPherson 1991)). Various kits are commercially available, for example the QUIKCHANGE™ lightening mutagenesis kit from Qiagen or Stratagene.

[0062] According to a second embodiment of the first aspect, there are provided variants which may or may not be variants according to the first embodiment. The P450-BM3 variants according to the second embodiment comprise
[0063] (i) at least the mutations
   [0064] a) V78Y, A82E and F87A (BM3-254, SEQ ID No. 2),
   [0065] b) V78M, A82E and F87A (BM3-261, SEQ ID No. 3),
   [0066] c) V78I, A82E and F87A (BM3-263, SEQ ID No. 4),
   [0067] d) V78L, A82E and F87A (BM3-268, SEQ ID No. 5).
   [0068] e) V78Y, A82P and F87A (SEQ ID No. 6),
   [0069] f) V78M, A82P and F87A (SEQ ID No. 7),
   [0070] g) V78I, A82P and F87A (SEQ ID No. 8),
   [0071] h) V78L, A82P and F87A (SEQ ID No. 9),
   [0072] i) V78Y, A82Q and F87A (SEQ ID No. 10),
   [0073] j) V78M, A82Q and F87A (SEQ ID No. 11),
   [0074] k) V78I, A82Q and F87A (SEQ ID No. 12), or
   [0075] I) V78L, A82Q and F87A (SEQ ID No. 13),
   and at least one, two, three, four, five, six, seven, eight, nine or ten further mutation(s), and/or
[0076] (ii) at least the mutations
   [0077] a) V78F, A82E, F87A, M177Y and A184Y (SEQ ID No. 14),
   [0078] b) V78L, A82E, F87A, M177Y and A184Y (SEQ ID No. 15),
   [0079] c) V78I, A82E, F87A, M177Y and A184Y (SEQ ID No. 16),
   [0080] d) V78M, A82E, F87A, M177Y and A184Y (SEQ ID No. 17),
   [0081] e) V78Y, A82E, F87A, M177Y and A184Y (SEQ ID No. 18),
   [0082] f) V78F, A82P, F87A, M177Y and A184Y (SEQ ID No. 19),
   [0083] g) V78L, A82P, F87A, M177Y and A184Y (SEQ ID No. 20),
   [0084] h) V78I, A82P, F87A, M177Y and A184Y (SEQ ID No. 21),
   [0085] i) V78M, A82P, F87A, M177Y and A184Y (SEQ ID No. 22),
   [0086] j) V78Y, A82P, F87A, M177Y and A184Y (SEQ ID No. 23),
   [0087] k) V78F, A82Q, F87A, M177Y and A184Y (SEQ ID No. 24),
   [0088] I) V78L, A82Q, F87A, M177Y and A184Y (SEQ ID No. 25),
   [0089] m) V78I, A82Q, F87A, M177Y and A184Y (SEQ ID No. 26),
   [0090] n) V78M, A82Q, F87A, M177Y and A184Y (SEQ ID No. 27),
   [0091] o) V78Y, A82Q, F87A, M177Y and A184Y (SEQ ID No. 28),
   [0092] p) V78L, A82E, F87A, S72G, M177Y, V178P, L181Y, A184Y and L188F (SEQ ID No. 117),
   [0093] q) V78L, A82E, F87A, S72G, T146F, M177Y, V178W, L181Y and A184Y (SEQ ID No. 118), or
   [0094] r) V78L, A82E, F87A, S72G, T146F, M177Y, V178W, L181Y, A184Y, G457S, I458G and A477N (SEQ ID No. 119).

[0095] In some highly preferred of these second embodiments, the P450-BM3 variant comprises S72G. In some highly preferred of these second embodiments, the P450-BM3 variant comprises T146F. In some highly preferred of these second embodiments, the P450-BM3 variant comprises M177Y. In some highly preferred of these second embodiments, the P450-BM3 variant comprises V178W. In some highly preferred of these second embodiments, the P450-BM3 variant comprises V178P. In some highly preferred of these second embodiments, the P450-BM3 variant comprises L181Y. In some highly preferred of these second embodiments, the P450-BM3 variant comprises A184Y. In some highly preferred of these second embodiments, the P450-BM3 variant comprises L188F. In some highly preferred of these second embodiments, the P450-BM3 variant comprises G457S. In some highly preferred of these second embodiments, the P450-BM3 variant comprises 1458G. In some highly preferred of these second embodiments, the P450-BM3 variant comprises A477N. Except where obviously incompatible with each other, these highly preferred embodiments can be combined.

[0096] The BM3 variants according to the second embodiment may or may not comprise further mutation(s).

[0097] Some preferred of the variants according to the second embodiment of the first aspect comprise at least one further mutation, preferably at least one, two, three, four, five, six, seven, eigth, nine, ten, eleven, twelve, thirteen, fourteen, fifteen or more further mutations.

[0098] While the P450-BM3 wild type as well as hundreds of tested variants from literature or generated de novo were not able to catalyze the C19 hydroxylation of steroids or steroid derivatives, the variants according to the first aspect were surprisingly found to be suitable catalysts for the efficient C19 hydroxylation of steroids or derivatives thereof.

[0099] Without being bound by theory, the described variants according to the aspect at hand, in particular the variants according to SEQ ID No. 2 to 28 and 117 to 119 are technically related, such that they induce a tertiary protein structure which enables not only the binding of steroids but also their efficient C19 hydroxylation, without supporting side reactions, such as other oxidation reactions, e.g. as mentioned herein.

[0100] In brief, the P450-BM3 variants according to the first aspect recognize steroids as substrates, in particular steroids comprising a 1,4-dien-3-one-A-ring, or steroids comprising a 4-en-3-one-A-ring. Furthermore, the P450-BM3 variants according to the first aspect can catalyze the C19 hydroxylation of these steroids.

[0101] Without being bound by theory, for steroids with a 1,4-dien-3-one-A-ring such as (17beta)-17-hydroxyandrosta-1,4-dien-3-one (synonyms: 1-dehydrotestosterone, Δ1-testosterone, boldenone) or androsta-1,4-dien-3,17-dione (synonym: ADD) a C19-hydroxylation is believed to lead to an instable intermediate undergoing immediate aromatization and formation of estradiol or estrone and their derivatives.

[chemical structure]

[0102] Example 8, Table E2 show the obtained screening yields of estradiol based on delta-1-testosterone as a substrate for P450-BM3 variants BM3-254 (SEQ ID No. 2), BM3-261 (SEQ ID No. 3), BM3-263 (SEQ ID No. 4) and BM3-268 (SEQ ID No. 5).

[0103] Without being bound by theory, for steroids with a 4-en-3-one-A-ring like (17beta)-17-hydroxyandrost-4-en-3-one (synonym: testosterone) the product of C19-hydroxylation is typically stable and can be isolated. These kind of products can then by further functionalization under dehydrogenation form the same instable intermediate and subsequently under aromatization estradiol and estradiol derivatives (as shown for similar estrone derivatives by (F. Templeton 1997).

[chemical structure]

[0104] Example 9, Table E5 show the obtained screening yields for C19 hydroxylated products based on testosterone as a substrate for P450-BM3 variants BM3-254 (SEQ ID No. 2), BM3-261 (SEQ ID No. 3), BM3-263 (SEQ ID No. 4) and BM3-268 (SEQ ID No. 5).

[0105] In consequence, the described P450-BM3 variants are suitable catalysts for the C19-hydroxylation of steroids, thereby enabling production of compounds of formula (I)

[chemical structure]

[0106] wherein R¹ and R² form a six-membered ring as part of a steroid. In particular, the described P450-BM3 variants according to the first aspect are suitable catalysts for the C19-hydroxylation of steroids, thereby enabling production of compounds of formula (II)

[chemical structure]

wherein R³ is a beta-hydroxy group (-OH) or an oxo group (=O).

[0107] According to some highly preferred embodiments the P450-BM3 variants according to the first aspect catalyze the C19-hydroxylation of steroids for the production of compounds of formula (I) wherein the formula (I) is preferably formula (II).

[0108] Without being bound by theory, by using the P450-BM3 variants as catalysts, the compounds of formula (I) and (II) can thus be synthesized in the following ways:

[chemical structure]

[chemical structure]

[0109] Estradiol and estradiol derivatives can be oxidized to estrone and estrone derivatives, e.g. as described by (Kawahara R 2012).

[chemical structure]

[0110] According to a third embodiment of the first aspect, there are provided variants which are characterized by a product yield for at least one C19 hydroxylated steroid or derivative thereof or a secondary product thereof which is higher than 1, 2, 3, 4, 5, 6, 7, 8, 9, 10, 11, 12, 13, 14, 15, 16, 17, 18, 19, 20, 21, 22, 23, 24, 25, 26, 27, 28, 29, 30, 31, 32, 33, 34, 35, 36, 37, 38, 39, 40, 41, 42, 43, 44, 45, 46, 47, 48, 49, 50, 51, 52, 53, 54, 55, 56, 57, 58, 59, 60, 61, 62, 63, 64, 65, 66, 67, 68, 69, 70, 71, 72, 73, 74, 75, 76, 77, 78, 79, 80, 81, 82, 83, 84, 85, 86, 87, 88, 89, 90, 92, 92, 93, 94 or 95%.

[0111] For example, said product yield for the at least one C19 hydroxylated steroid or derivative thereof, or a secondary product thereof can be > 5%, preferably > 8%, >10%, or > 12%, even more preferably > 15%, >20%, >25%, > 30%, >35%, > 40%, > 45%, or > 50%, most preferably > 55%, > 60%, > 65%, > 70% or > 75%. For example, said product yield can be the product yield for the product estradiole or estrone, or derivatives thereof. For example, said steroid or steroid derivative can be a a steroid or steroid derivative comprising a 1,4-dien-3-one-A-ring or a 4-en-3-one-A-ring, such as d1-testosterone or ADD.

[0112] The third embodiment according to the first aspect can be and is suggested to be combined with each embodiment or example according to the first aspect and in particular the first, second, fourth, fifth or sixth embodiment of the first aspect.

[0113] For example there is provided a BM3 variant comprising the mutation F87A and at least one and preferably two further mutations selected from
[0114] (i) a mutation at position V78, preferably V78F, V78Y, V78M, V78l or V78L, and
[0115] (ii) a mutation at position A82, preferably A82E, A82Q or A82P,
and optionally comprising further mutations, e.g. as specified elsewhere herein, said BM3 variant having a product yield for the at least one C19 hydroxylated steroid or derivative thereof or a secondary product thereof > 5%, preferably > 8%, >10%, or > 12%, even more preferably > 15%, >20%, >25%, > 30%, >35%, > 40%, > 45%, or > 50%, most preferably > 55 %, > 60%, > 65%, > 70% or > 75%.

[0116] For example, the BM3 variant may comprise the mutations M177Y and/or A184Y.

[0117] For example there is provided a BM3 variant comprising
[0118] (i) at least the mutations
   [0119] a) V78Y, A82E and F87A (BM3-254, SEQ ID No. 2),
   [0120] b) V78M, A82E and F87A (BM3-261, SEQ ID No. 3),
   [0121] c) V78I, A82E and F87A (BM3-263, SEQ ID No. 4),
   [0122] d) V78L, A82E and F87A (BM3-268, SEQ ID No. 5).
   [0123] e) V78Y, A82P and F87A (SEQ ID No. 6),
   [0124] f) V78M, A82P and F87A (SEQ ID No. 7),
   [0125] g) V78I, A82P and F87A (SEQ ID No. 8),
   [0126] h) V78L, A82P and F87A (SEQ ID No. 9),
   [0127] i) V78Y, A82Q and F87A (SEQ ID No. 10),
   [0128] j) V78M, A82Q and F87A (SEQ ID No. 11),
   [0129] k) V78I, A82Q and F87A (SEQ ID No. 12), or
   [0130] I) V78L, A82Q and F87A (SEQ ID No. 13),
   and at least one, two, three, four, five, six, seven, eight, nine or ten further mutation(s), and/or
[0131] (ii) at least the mutations
   [0132] a) V78F, A82E, F87A, M177Y and A184Y (SEQ ID No. 14),
   [0133] b) V78L, A82E, F87A, M177Y and A184Y (SEQ ID No. 15),
   [0134] c) V78I, A82E, F87A, M177Y and A184Y (SEQ ID No. 16),
   [0135] d) V78M, A82E, F87A, M177Y and A184Y (SEQ ID No. 17),
   [0136] e) V78Y, A82E, F87A, M177Y and A184Y (SEQ ID No. 18),
   [0137] f) V78F, A82P, F87A, M177Y and A184Y (SEQ ID No. 19),
   [0138] g) V78L, A82P, F87A, M177Y and A184Y (SEQ ID No. 20),
   [0139] h) V78I, A82P, F87A, M177Y and A184Y (SEQ ID No. 21),
   [0140] i) V78M, A82P, F87A, M177Y and A184Y (SEQ ID No. 22),
   [0141] j) V78Y, A82P, F87A, M177Y and A184Y (SEQ ID No. 23),
   [0142] k) V78F, A82Q, F87A, M177Y and A184Y (SEQ ID No. 24),
   [0143] I) V78L, A82Q, F87A, M177Y and A184Y (SEQ ID No. 25),
   [0144] m) V78I, A82Q, F87A, M177Y and A184Y (SEQ ID No. 26),
   [0145] n) V78M, A82Q, F87A, M177Y and A184Y (SEQ ID No. 27),
   [0146] o) V78Y, A82Q, F87A, M177Y and A184Y (SEQ ID No. 28),
   [0147] p) V78L, A82E, F87A, S72G, M177Y, V178P, L181Y, A184Y and L188F (SEQ ID No. 117),
   [0148] q) V78L, A82E, F87A, S72G, T146F, M177Y, V178W, L181Y and A184Y (SEQ ID No. 118), or
   [0149] r) V78L, A82E, F87A, S72G, T146F, M177Y, V178W, L181Y, A184Y, G457S, I458G and A477N (SEQ ID No. 119),
said BM3 variant having a product yield for at least one C19 hydroxylated steroid or derivative thereof or a secondary product thereof > 5%, preferably > 8%, >10%, or > 12%, even more preferably > 15%, >20%, >25%, > 30%, >35%, > 40%, > 45%, or > 50%, most preferably > 55%, > 60%, > 65%, > 70% or > 75%.

[0150] Table A1 shows estradiol product yields for d1-testosterone to estradiol conversion from 50 mg/L substrate for variants derived from the parent type V78L, A82E, F87A (SEQ ID No. 5) having further mutations as depicted.

| Mutation | Yield Estradiol [%] | Mutation | Yield Estradiol [%] | Mutation | Yield Estradiol [%] | Mutation | Yield Estradiol [%] |
|---|---|---|---|---|---|---|---|
| A74I | 52.8 | V178M | 10.9 | L181I | 7.7 | M177G | 6.0 |
| A74V | 42.2 | A184Q | 10.8 | A399Q | 7.7 | M118K | 6.0 |
| S72G, A74V | 40.2 | A321G | 10.7 | R50D | 7.7 | L29Y | 6.0 |
| F77A | 38.3 | P392Q | 10.5 | M177A | 7.6 | A399L | 6.0 |
| A184G | 37.4 | A399E | 10.5 | S72C, A74C | 7.6 | M177I | 6.0 |
| M177Y | 36.5 | M177F | 10.4 | S89V | 7.6 | T49H | 6.0 |
| V178P | 36.3 | T365I | 10.3 | R50S | 7.5 | R47C | 6.0 |
| A184Y | 34.2 | L75V, F81L | 10.3 | V371A | 7.5 | I401V | 5.9 |
| A74T | 33.3 | F77P | 10.2 | E143I | 7.5 | T146A | 5.9 |
| A184R | 31.5 | V314P | 10.2 | T49Q | 7.5 | S176L | 5.9 |
| R50S, A74V | 30.7 | S72G, A74Y | 10.2 | T365G | 7.5 | S72G, A74F | 5.9 |
| S72G, A74I | 30.2 | S89E | 10.1 | F77M | 7.5 | K224W | 5.9 |
| A74C | 29.2 | M118E | 10.0 | T146D | 7.5 | E267T | 5.9 |
| M185V | 29.1 | T146R | 10.0 | R47H | 7.4 | M185D | 5.8 |
| L188K | 27.0 | V26I | 9.9 | R255K | 7.4 | Y51L | 5.8 |
| A330R | 26.3 | E64Q | 9.9 | E143V | 7.4 | M118S | 5.8 |
| K224P | 26.0 | W90Y | 9.7 | V314F | 7.3 | M118T | 5.8 |
| V48H | 25.9 | L29T | 9.6 | A330F | 7.3 | A399G | 5.8 |
| V26N | 25.9 | T327V | 9.6 | Y51W | 7.3 | A330C | 5.8 |
| A184E | 24.9 | F81W | 9.6 | M118A | 7.3 | K224Y | 5.8 |
| F77V | 24.8 | H266N | 9.6 | T49D | 7.3 | S89G | 5.7 |
| A184W | 24.7 | A184F | 9.6 | E267D | 7.2 | S72N, A74I | 5.7 |
| A74M | 24.2 | V48S | 9.5 | F261Y | 7.2 | S72C, A74L | 5.7 |
| F77S | 24.1 | M177T | 9.5 | T365L | 7.2 | E143Q | 5.7 |
| A74L | 23.8 | G85A | 9.5 | W90D | 7.2 | R47D | 5.7 |
| V26H | 23.5 | M118Y | 9.5 | L29M | 7.2 | A264V | 5.6 |
| F77L | 23.0 | L437I | 9.5 | L75I | 7.2 | R47M | 5.6 |
| A184D | 22.3 | R50Y | 9.4 | V26A | 7.2 | N70R | 5.6 |
| M177V | 21.9 | M118W | 9.4 | T49W | 7.2 | I401M | 5.6 |
| F77T | 20.5 | A74R, L75V | 9.3 | R50P | 7.2 | F393W | 5.6 |
| T146F | 20.3 | E64V | 9.3 | L29V | 7.2 | A74D, F81V | 5.6 |
| V178W | 20.0 | A321N | 9.2 | R47T | 7.1 | G415D | 5.6 |
| L188R | 19.7 | M118L | 9.2 | S72N, A74C | 7.1 | L75I, F81I | 5.6 |
| A74F | 19.7 | L188A | 9.2 | V48Y | 7.1 | T49G | 5.6 |
| F77K | 19.7 | T365W | 9.2 | T146C | 7.1 | S89N | 5.5 |
| L188N | 19.5 | T49C | 9.2 | E143M | 7.1 | E64A | 5.5 |
| T49R | 19.4 | I263L | 9.1 | V48F | 7.0 | E143G | 5.5 |
| S89T | 19.4 | T146M | 9.1 | R255P | 7.0 | A330N | 5.5 |
| L188W | 19.1 | T49A | 9.1 | R50I | 7.0 | H266E | 5.5 |
| A74W | 19.0 | V48T | 9.0 | H266A | 7.0 | R50F | 5.5 |
| V178Y | 19.0 | M118P | 8.9 | M118V | 7.0 | F77G | 5.4 |
| A74Y | 18.9 | V314E | 8.9 | L29A | 7.0 | R47E | 5.4 |
| M177C | 18.8 | M177L | 8.8 | E143K | 7.0 | R255A | 5.4 |
| A184K | 18.4 | F77Y | 8.8 | E64Y | 6.9 | A74V, L75V | 5.4 |
| A184N | 18.2 | R50G | 8.8 | L29I | 6.9 | L78M | 5.4 |
| H266S | 18.1 | R47L | 8.8 | F77D | 6.9 | T146N | 5.3 |
| S89C | 18.1 | R50N | 8.7 | T49F | 6.8 | F261V | 5.3 |
| L188F | 17.9 | F77H | 8.7 | S89I | 6.8 | K224L | 5.3 |
| V178Q | 17.6 | E143F | 8.7 | F81Y | 6.8 | I401A | 5.3 |
| S176P | 17.5 | F261I | 8.7 | V48R | 6.8 | R47W | 5.3 |
| F77E | 17.2 | V178R | 8.7 | R255N | 6.8 | T365D | 5.3 |
| L188I | 17.0 | A184L | 8.7 | V178N | 6.8 | N70F | 5.2 |
| S72W | 16.9 | A74R | 8.6 | S72N, A74V | 6.8 | N70C | 5.2 |
| S72G, A74C | 16.9 | T49L | 8.6 | E267R | 6.7 | S176N | 5.2 |
| A399V | 16.8 | P392G | 8.6 | E143P | 6.7 | L86V | 5.2 |
| L181Y | 16.4 | F77N | 8.6 | L75V | 6.7 | E143N | 5.2 |
| S176G | 15.8 | F261M | 8.6 | R50C | 6.6 | V48M | 5.2 |
| L181P | 15.8 | S89Q | 8.6 | T438V | 6.6 | K224M | 5.1 |
| S176M | 15.4 | T365Q | 8.6 | V48L | 6.6 | A321T | 5.1 |
| G415A | 15.4 | E143C | 8.6 | R47A | 6.6 | A321E | 5.1 |
| F77W | 15.2 | F77I | 8.5 | E143A | 6.6 | E64L | 5.1 |
| T49V | 15.2 | M177H | 8.5 | A330T | 6.5 | G85S | 5.1 |
| M118G | 15.2 | V26M | 8.5 | V48I | 6.5 | T146V | 5.1 |
| A330K | 14.9 | V178S | 8.5 | L75V, F81Y | 6.5 | L75I, F81L | 5.1 |
| K224H | 14.9 | V314A | 8.5 | L86M | 6.5 | M177E | 5.1 |
| S72G, A74L | 14.8 | I263K | 8.5 | S176K | 6.5 | M118N | 5.1 |
| A184H | 14.7 | V178L | 8.5 | S72H, A74C | 6.5 | I401T | 5.0 |
| M177Q | 14.6 | T49N | 8.4 | A321I | 6.5 | | |
| A330W | 14.5 | A330V | 8.4 | L29Q | 6.4 | | |
| L188H | 14.2 | E143D | 8.3 | T365K | 6.4 | | |
| A399I | 14.0 | F77R | 8.3 | S176H | 6.4 | | |
| V178D | 14.0 | S176F | 8.3 | M177D | 6.4 | | |
| T327L | 13.7 | A399N | 8.2 | S89L | 6.4 | | |
| A74H | 13.6 | G415T | 8.2 | E344K | 6.3 | | |
| G415S | 13.5 | R47Q | 8.2 | K224C | 6.3 | | |
| T365V | 13.4 | E64G | 8.1 | F81S | 6.3 | | |
| S176C | 13.1 | V26K | 8.1 | L29H | 6.3 | | |
| V314H | 13.0 | R50M | 8.1 | F261C | 6.3 | | |
| T365Y | 12.8 | A74P | 8.1 | W325F | 6.3 | | |
| S72G, A74S | 12.8 | S176D | 8.1 | F393M | 6.3 | | |
| T365P | 12.7 | L29C | 8.1 | E143Y | 6.3 | | |
| A74S | 12.6 | A321V | 8.1 | A321D | 6.3 | | |
| F77C | 12.6 | R50V | 8.0 | K224I | 6.2 | | |
| L188M | 12.5 | E143R | 8.0 | | | S72G, A74H | 6.2 |
| R50Q | 12.5 | V314Q | 8.0 | | | T365F | 6.2 |
| R255I | 12.4 | E64H | 8.0 | | | V178T | 6.2 |
| V178I | 12.4 | P392R | 8.0 | | | M118H | 6.2 |
| V314S | 12.2 | L188S | 8.0 | | | V26G | 6.2 |
| A399M | 12.0 | R47K | 8.0 | | | F261A | 6.2 |
| A74C, L75V | 12.0 | I263N | 7.9 | | | E344G | 6.2 |
| L188D | 11.8 | V178K | 7.9 | | | S176Q | 6.2 |
| T49P | 11.6 | V26L | 7.9 | | | K224E | 6.1 |
| P392V | 11.6 | F81L | 7.8 | | | A74N | 6.1 |
| L188E | 11.5 | S72C, A74V | 7.8 | | | M177N | 6.1 |
| T49I | 11.4 | R50L | 7.8 | | | V178A | 6.1 |
| A399C | 11.4 | V371P | 7.8 | | | L75I, F81V | 6.1 |
| M118F | 11.3 | V48W | 7.8 | | | R255L | 6.1 |
| E143W | 11.1 | V48D | 7.8 | | | S176E | 6.1 |
| L29F | 10.9 | L262I | 7.7 | | | A330D | 6.1 |

[0151] Table A2 shows estradiol product yields for Δ1-testosterone to estradiol conversion from 100 mg/L substrate for variants derived from the parent type V78L, A82E, F87A, M177Y, A184Y (SEQ ID No. 15) having further mutations as depicted.

| Mutation | Yield Estradio [%] | Mutatio n | Yield Estradio [%] | Mutation | Yield Estradio [%] | Mutation | Yield Estradio [%] |
|---|---|---|---|---|---|---|---|
| L150W | 65.2 | L20R | 39.4 | F205R | 44.0 | L20C | 33.3 |
| L78M | 64.0 | T149P | 39.3 | A330W | 43.8 | T146V, A191T | 33.2 |
| L20W | 59.5 | F205K | 38.8 | F205D | 43.4 | L20Y | 32.3 |
| M212F | 52.2 | W325Y | 38.6 | F205D. D208N | 43.2 | L20M | 31.4 |
| L20F | 52.2 | P9S | 38.3 | L150Y | 43.1 | T49A | 31.3 |
| A330Y | 50.1 | V26Q | 37.0 | T327M | 42.3 | T146A. L272W | 30.8 |
| M212Y | 48.9 | R47S | 36.4 | L20N | 41.9 | T49L | 30.7 |
| E267D | 48.3 | L272V | 36.1 | K210E | 41.7 | L150F | 30.2 |
| L20P | 47.5 | S89T | 35.5 | T146A, L150A | 41.7 | T146L | 28.5 |
| M212W | 47.1 | F205H | 35.1 | R47W | 41.5 | L20D | 28.2 |
| F205Y | 46.8 | W325F | 34.4 | F205E | 41.4 | L20S | 28.1 |
| F205G | 46.4 | E93G | 34.2 | F77V | 41.2 | L20I | 27.7 |
| F205W | 45.0 | T49P | 34.0 | L20T | 40.7 | L20V | 26.6 |
| T146A, F205G | 44.2 | E352N | 33.5 | F205T | 39.7 | T49I | 25.9 |

[0152] Table A3 shows product yield for estradiol obtained in biotransformation reactions with BM3-268; M177Y, A184Y (SEQ ID No. 15) variants having up to six mutations. 100 mg/L Δ1-testosterone were used as substrate.

| Mutations | Yield Estradio [%] | Mutations | Yield Estradio [%] |
|---|---|---|---|
| S72G,A74V,T146F,V178W,L181Y | 75.9 | T146F,V178W,L188F | 49.1 |
| S72G,A74T,T146F,V178W,L181Y,L18 8R | 72.8 | A74T,T146F,V178P,L181Y | 47.9 |
| S72G,A74V,T146F,V178W,L188R | 72.3 | S72G,V178W | 47.7 |
| S72G,A74T,T146F,V178W,L188R | 72.2 | V178P | 47.0 |
| S72G,A74V,T146F,L181Y,L188R | 72.1 | T146F,V178W,L188K | 46.1 |
| S72G,T146F,V178W,L188F | 65.9 | S72G,V178W,L181Y | 45.8 |
| S72G,A74V,T146F,L181Y | 65.8 | S72G,A74T,L181Y,L188F | 45.1 |
| S72G,V178P,L181Y | 64.8 | S72G,V178W,L188F | 45.0 |
| A74T,T146F,L181Y,L1 88R | 63.9 | S72G,L188F | 44.9 |
| S72G,A741,V178P,L181Y | 62.6 | S72G,A74T,T146F,V178W,L188F | 44.7 |
| S72G,A74V,T146F,V178W | 61.2 | S72G,A74V,T146F,V178P,L181Y,L18 8R | 44.5 |
| A741,T146F,V178W | 61.0 | T146F,V178W | 43.7 |
| S72G,T146F,V178W,L 188R | 61.0 | S72G | 43.6 |
| S72G,A741,T146F,L181Y,L188K | 60.7 | S72G,A74T,T146F,L188R | 43.1 |
| S72G,T146F,V178W,L181Y,L188F | 59.0 | S72G,T146F,V178W | 42.9 |
| T146F,V178W,L188R | 58.9 | S72G,A74V,T146F,V178P,L181Y,L18 8K | 41.9 |
| A74V,V178P,L181Y,L188K | 58.4 | S72G,V178W,L188R | 39.9 |
| T146F,L181Y,L188F | 58.1 | S72G,T146F,L188F | 38.8 |
| S72G,V178P,L181Y,L188F | 57.6 | S72G,A741,T146F,L181Y,L188F | 35.0 |
| V178P,L181Y | 56.9 | S72G,T146F | 34.7 |
| S72G,V1 78P,Ll 81Y,L188K | 56.0 | A74V,V178P,L181Y,L188F | 34.4 |
| S72G,A74V,T146F,V178P,L181Y | 56.0 | S72G,A74T,L181Y,L188K | 33.7 |
| S72G,V1 78P,Ll 81Y,L188R | 55.8 | S72G,A741,T146F,L181Y,L188R | 29.9 |
| S72G,T146F,V178W,L181Y | 55.4 | A74T,T146F,L188K | 29.8 |
| S72G,T146F,V178W,L188K | 55.4 | S72G,A74V,L188R | 29.5 |
| T146F,L181Y | 55.3 | S72G,A74T,T146F,V178P,L181Y | 29.2 |
| S72G,A74T,T146F,L181Y,L1 88K | 54.8 | S72G,V178W,L188K | 29.1 |
| S72G,A74V,V178P,L181Y,L188K | 54.1 | S72G,A741,T146F,L181Y | 28.8 |
| S72G,T146F,V178W,L181Y,L188K | 53.9 | S72G,T146F,V178P,L188R | 28.3 |
| A74T,T146F,L181Y,L188K | 53.9 | S72G,A74T,V178P,L188F | 28.2 |
| T146F,V178W,L181Y,L188R | 52.6 | V178W | 28.2 |
| A74V,V178P,L181Y,L188R | 52.1 | S72G,T146F,L181Y,L1 88R | 26.6 |
| V178P,L181Y,L188R | 52.0 | A74T,T146F,V178P,L188R | 26.2 |
| A74T,T146F,V178W | 51.3 | | |

[0153] Table A4 shows estrone product yields for ADD to estrone conversion from 100 mg/L substrate for variants derived from the parent type BM3-268; M177Y, A184Y (SEQ ID No. 15) having further mutations as depicted.

| Mutation(s) | Yield Estrone | Mutation(s) | Yield Estrone | Mutation(s) | Yield Estrone |
|---|---|---|---|---|---|
| F205Y | 24.5 | F205K | 8.4 | L272W | 6.3 |
| M212Y | 18.9 | L150G | 8.1 | L272F | 6.3 |
| L150Y | 18.4 | F205P | 8.0 | T146A, L272H | 6.1 |
| M212F | 17.2 | E352I | 7.9 | E352N | 5.8 |
| F205H | 15.8 | L20F | 7.9 | T438V | 5.8 |
| F205R | 15.6 | M212T | 7.6 | E93G | 5.7 |
| L20W | 15.4 | E352V | 7.5 | T49Q | 5.7 |
| F205G | 15.2 | F81D | 7.4 | F205S | 5.6 |
| L78M | 14.0 | L20P | 7.4 | D363G, T438C | 5.5 |
| F205W | 13.2 | F173Y,1174F | 6.8 | W325Y | 5.4 |
| M212W | 13.0 | T49I | 6.7 | M212H | 5.4 |
| K210E | 11.6 | T49R | 6.7 | T438C | 5.3 |
| L20Y | 11.3 | L272Y | 6.7 | L150W | 5.3 |
| T146F | 10.7 | L20R | 6.7 | F205I | 5.1 |
| L150F | 10.5 | F205N | 6.6 | F205V | 5.1 |
| S89T | 10.0 | E352M | 6.6 | F81Y | 5.1 |
| T146A, F205G | 9.7 | R203C | 6.5 | | |
| F205D, D208N | 9.5 | F205D | 6.4 | | |

[0154] Table A5 shows the product yield for estrone obtained in biotransformation reactions with SEQ ID No. 15 derived variants having up to six mutations. 100 mg/L ADD were used as substrate.

| Mutation(s) | Yield Estrone [%] | Mutation(s) | Yield Estrone [%] | Mutation(s) | Yield Estrone [%] |
|---|---|---|---|---|---|
| S72G,T146F,V178W, L181Y | 66.6 | S72G,V178P,L181Y ,L188R | 14.8 | S72G,V178W,L188 R | 7.9 |
| S72G,T146F,V178W, L181Y,L188F | 58.4 | S72G,V178W,L181 Y | 14.7 | S72G,T146F,V178P, L188F | 7.6 |
| S72G,T146F,V178W | 55.2 | S72G,A74T,T146F, V178P | 14.6 | S72G,A741,T146F,L 181Y,L188R | 7.6 |
| S72G,T146F,V178W, L188F | 53.1 | S72G,A74V,V178W, L181Y | 14.6 | S72G,A74V,T146F, V178P,L188R | 7.5 |
| S72G,V178P,L181Y | 38.1 | S72G,A74V,V178P, L188R | 14.1 | S72G,A74I,T146F, 178P,L188K | 7.5 |
| S72G,T146F,L181Y,L 188R | 37.4 | S72G,A74I,T146F,V 178P,L181Y | 14.0 | S72G,T146F,V178P, L181Y,L188F | 7.2 |
| S72G,T146F,L181Y,L 188F | 37.3 | S72G,T146F | 13.6 | A74T,T146F,V178P, L188K | 7.0 |
| S72G,A74V,T146F,V1 78W,L181Y | 36.3 | S72G,T146F,V178 W,L188K | 13.5 | S72G,A74I,T146F,V 178P,L181Y,L188F | 6.9 |
| S72G,T146F,V178W, L188R | 33.5 | S72G,V178P,L188R | 13.2 | S72G,A74V,T146F,L 181Y,L188K | 6.9 |
| S72G,A74T,T146F,V1 78W,L181Y,L188R | 30.0 | S72G,A74V,L181Y | 13.1 | S72G,A74I,T146F,V 178P,L188F | 6.9 |
| S72G,A74V,T146F,L1 81Y | 29.4 | S72G,A74V,T146F, V178P,L181Y,L188 R | 13.0 | S72G,L188K | 6.8 |
| S72G,T146F,V178P,L 181Y | 29.0 | T146F,L181Y,L188F | 12.9 | S72G,A74V,V178P, L181Y,L188R | 6.6 |
| S72G,A74T,V178P,L1 81Y | 27.6 | S72G | 12.7 | S72G,T146F,L188K | 6.6 |
| S72G,A74T,T146F,V1 78W,L181Y | 26.5 | S72G,A74T,T146F, V178P,L181Y | 12.3 | S72G,A74l,T146F,L 181Y | 6.5 |
| S72G,V178P,L181Y,L 188F | 25.2 | S72G,L188F | 11.9 | S72G,A74V,T146F, V178W,L188R | 6.3 |
| T146F,L181Y | 25.2 | S72G,A741,V178P,L 181Y | 11.8 | T146F,V178W,L188 R | 6.2 |
| S72G,A74V,T146F,L1 81Y,L188F | 24.1 | S72G,A74T,V178P, L188F | 11.7 | A741,T146F,L181Y | 6.2 |
| S72G,A74V,V178P,L1 81Y,L188F | 23.1 | A74T,T146F,V178P, L181Y | 11.5 | A74T,T146F,V178W | 6.2 |
| S72G,A74T,T146F,V1 78W,L188F | 23.0 | S72G,A74V,T146F, V178W | 11.3 | S72G,A74V,V178P | 6.1 |
| S72G,A74T,T146F,V1 78W,L181Y,L188K | 22.7 | S72G,T146F,V178P | 11.3 | T146F,V178W,L188 F | 6.0 |
| S72G,T146F,L181Y,L 188K | 21.4 | S72G,V178P | 11.1 | V178P | 6.0 |
| S72G,A74V,T146F,V1 78P,L181Y | 20.8 | A74l,T146F,V178P | 11.0 | S72G,A74V,T146F,L 188F | 5.9 |
| S72G,A74I,T146F,V1 78W,L181Y | 20.7 | S72G,V178W,L188 F | 10.8 | S72G,A74I,T146F,V 178P,L188R | 5.9 |
| S72G,A74V,T146F,L1 81Y,L188R | 20.6 | T146F | 10.7 | S72G,L188R | 5.9 |
| S72G,A74T,V178P,L1 81Y,L188K | 20.3 | S72G,A74V,T146F, V178P,L188F | 10.3 | S72G,V178W,L188K | 5.8 |
| T146F,V178W,L181Y, L188R | 19.6 | S72G,V178P,L181Y ,L188K | 10.0 | S72G,A74I,T146F,V 178P | 5.8 |
| S72G,L181Y,L188R | 18.8 | S72G,A74V,T146F, V178W,L181Y,L188 R | 10.0 | S72G,A74T,T146F, V178P,L188R | 5.7 |
| S72G,T146F,V178W, L181Y,L188K | 18.8 | V178P,L181Y | 9.9 | S72G,T146F,L188R | 5.6 |
| A74T,T146F,V178W,L 181Y | 18.3 | A74T,T146F,L181Y, L188K | 9.3 | S72G,T146F,L181Y | 5.6 |
| S72G,A74T,T146F,L1 81Y,L188K | 18.0 | S72G,A74V,V178P, L188F | 9.3 | T146F,L181Y,L188K | 5.4 |
| S72G,L181Y,L188K | 18.0 | S72G,V178W,L181 Y,L188R | 9.0 | A74l,T146F,V178P, L188R | 5.3 |
| S72G,T146F,V178P,L 181Y,L188R | 17.4 | S72G,T146F,V178P ,L188R | 8.9 | S72G,L181Y | 5.3 |
| S72G,A74V,T146F,V1 78P,L181Y,L188K | 16.8 | A74T,T146F,V178P | 8.8 | S72G,A74I,T146F,L 181Y,L188F | 5.3 |
| S72G,V178P,L188F | 16.5 | S72G,A74T,T146F, V178P,L188F | 8.7 | S72G,A74T,T146F, V178W,L181Y,L188 F | 5.2 |
| A74I,T146F,V178W,L 188R | 15.9 | S72G,T146F,L188F | 8.6 | S72G,A74I,T146F,V 178P,L181Y,L188R | 5.2 |
| S72G,V178P,L188K | 15.3 | T146F,V178P,L181 Y,L188R | 8.5 | A74V,T146F,L181Y, L188R | 5.1 |
| T146F,V178W,L188K | 15.3 | T146F,V178W | 8.4 | T146F,V178P | 5.1 |
| S72G,A74T,T146F,V1 78W,L188R | 14.9 | S72G,T146F,V178P ,L181Y,L188K | 8.2 | | |

[0155] Table A6 shows estrone product titers for ADD to estrone conversion from 2000 mg/L substrate for variants derived from the parent type BM3-268; M177Y, A184Y; S72G, V178P, L181Y, L188F (SEQ ID No. 117) having further mutations as depicted.

| Mutation | Estrone titer (mq/L) | Mutation | Estrone titer (mq/L) | Mutation | Estrone titer (mq/L) | Mutation | Estrone titer (mq/L) |
|---|---|---|---|---|---|---|---|
| R179L | 303.62 | P172A | 95.82 | N186E | 73.51 | H236D | 60.79 |
| K440C | 210.34 | D182I | 95.57 | Q404F | 73.20 | A44T | 60.30 |
| Q403R | 180.62 | H236A | 95.57 | K76C | 72.91 | A225M | 60.06 |
| R179A | 178.01 | R190S | 94.64 | G227N | 72.90 | H92Y | 59.91 |
| F173W | 169.97 | Q73E | 93.66 | H236P | 72.87 | G114L | 59.70 |
| G240K | 169.04 | T175N | 93.23 | R190C | 71.96 | E140L | 59.57 |
| R179V | 152.25 | R179H | 93.07 | A44Q | 71.48 | Q189I | 59.51 |
| R190V | 148.61 | N186Y | 92.47 | N186Q | 71.19 | A225S | 59.38 |
| K440T | 148.43 | N186F | 91.72 | E140D | 70.70 | D80L | 59.34 |
| R179M | 147.50 | I258C | 90.90 | G114N | 70.12 | M5E | 59.30 |
| K440N | 145.90 | I174T | 90.35 | R190W | 69.96 | A225N | 58.19 |
| R79K | 141.47 | T269V | 89.15 | N186D | 69.25 | Q189N | 57.96 |
| D182V | 141.05 | K76E | 88.93 | D182M | 67.40 | M5P | 57.88 |
| I258M | 139.83 | Q73L | 88.56 | K76N | 67.21 | Q73S | 57.80 |
| T175M | 136.11 | G240S | 86.69 | S270A | 66.64 | D80C | 57.66 |
| Q403K | 134.74 | N186K | 85.42 | H236M | 66.60 | D182A | 56.31 |
| K187N | 127.66 | T175Q | 82.76 | V299L | 66.47 | Q397R | 55.83 |
| H236K | 125.70 | R190G | 82.37 | S270D | 66.38 | D80S | 55.82 |
| D182C | 125.68 | N186H | 82.29 | H236R | 66.18 | I258L | 55.62 |
| G240R | 124.47 | G240H | 81.19 | E337V | 65.96 | N186V | 55.58 |
| A399R | 122.05 | D182E | 81.05 | E140K | 65.62 | K187A | 55.20 |
| H236S | 121.43 | G240N | 80.92 | S176M | 64.58 | D80W | 54.87 |
| R190M | 121.39 | N186A | 79.82 | Q73Y | 64.36 | G240C | 54.73 |
| K76I | 119.26 | N186L | 79.45 | Q189V | 64.26 | E140M | 54.62 |
| V299W | 119.23 | H236C | 79.42 | E140A | 64.05 | G114K | 54.56 |
| H236I | 118.01 | T175L | 79.26 | I74V | 63.70 | K187R | 54.55 |
| R190N | 114.74 | Q73T | 79.25 | D182N | 63.37 | K440M | 53.99 |
| A225T | 114.35 | Q73F | 78.92 | Q189K | 63.12 | E183D | 53.53 |
| T175G | 114.34 | K76F | 78.76 | T175R | 63.01 | D80M | 53.46 |
| N186M | 104.02 | D182W | 78.45 | G114W | 62.88 | E337L | 53.35 |
| N186T | 103.98 | D80T | 77.88 | G240A | 62.81 | M5C | 53.31 |
| T175F | 103.16 | Q73W | 77.22 | S53C | 62.05 | D182H | 52.88 |
| K76V | 100.58 | S176D | 76.43 | K76H | 61.81 | A225Q | 52.37 |
| Q404Y | 100.03 | A225C | 75.67 | G114C | 61.50 | I258V | 51.53 |
| T175H | 98.82 | P172D | 75.44 | H236F | 61.26 | D80N | 48.87 |
| T175Y | 98.67 | R179P | 74.92 | Q189E | 61.00 | G227R | 46.02 |
| K187G | 98.01 | A225Y | 74.80 | H92F | 60.99 | | |
| R190K | 96.19 | P172G | 74.43 | E140T | 60.90 | | |

[0156] According a fourth embodiment of the first aspect, there are provided variants which are characterized by a selectivity factor for the C19 hydroxylation of at least one steroid or derivative thereof, which is higher than 0.05, 0.06, 0.07, 0.08, 0.09, 0.1, 0.11, 0.12, 0.13, 0.14, 0.15, 0.16, 0.17, 0.18, 0.19, 0.2, 0.21, 0.22, 0.23, 0.24, 0.25, 0.26, 0.27, 0.28, 0.29, 0.3, 0.31, 0.32, 0.33, 0.34, 0.35, 0.36, 0.37, 0.38, 0.39, 0.4, 0.41, 0.42, 0.43, 0.44, 0.45, 0.46, 0.47, 0.48, 0.49, 0.5, 0.51, 0.52, 0.53, 0.54, 0.55, 0.56, 0.57, 0.58, 0.59, 0.6, 0.61, 0.62, 0.63, 0.64, 0.65, 0.66, 0.67, 0.68, 0.69, 0.7, 0.71, 0.72, 0.73, 0.74, 0.75, 0.76, 0.77, 0.78, 0.79, 0.8, 0.81, 0.82, 0.83, 0.84, 0.85, 0.86, 0.87, 0.88, 0.89, 0.9, 0.91, 0.92, 0.93, 0.94, 0.95, 0.96, 0.97, 0.98 or 0.99.

[0157] For example, said selectivity factor for the C19 hydroxylation of a steroid or steroid derivative can be > 0.1, preferably > 0.2 or > 0.3, even more preferably > 0.4 or > 0.5, most preferably > 0.5, > 0.6, > 0.7, > 0.8 or > 0.9. For example, said steroid or steroid derivative can be a a steroid or steroid derivative comprising a 1,4-dien-3-one-A-ring or a 4-en-3-one-A-ring, such as d1-testosterone or ADD.

[0158] The fourth embodiment according to the first aspect can be and is suggested to be combined with each embodiment according to the first aspect and in particular with the first, second, third, fifth, or sixth embodiment of the first aspect.

[0159] For example there is provided a BM3 variant comprising the mutation F87A and at least one and preferably two further mutations selected from
[0160] (i) a mutation at position V78, preferably V78F, V78Y, V78M, V78l or V78L, and
[0161] (ii) a mutation at position A82, preferably A82E, A82Q or A82P,
and optionally comprising further mutations, e.g. as described elsewhere herein, said BM3 variant having a selectivity factor for the C19 hydroxylation of at least one steroid or steroid derivative > 0.1, preferably > 0.2 or > 0.3, even more preferably > 0.4 or > 0.5, most preferably > 0.5, > 0.6, > 0.7, > 0.8 or > 0.9. Preferably, the BM3 variant is furthermore characterized by a product yield for the C19 hydroxylation of a steroid or steroid derivative > 5%, more preferably > 8 %, >10%, or > 12%, even more preferably > 15%, >20%, >25%, > 30%, > 35%, > 40%, > 45%, or > 50%, most preferably > 55%, > 60%, > 65%, > 70% or > 75%.

[0162] Preferably, the BM3 variant comprises the mutations M177Y and/or A184Y.

[0163] For example there is provided a BM3 variant comprising
[0164] (i) at least the mutations
   [0165] a) V78Y, A82E and F87A (BM3-254, SEQ ID No. 2),
   [0166] b) V78M, A82E and F87A (BM3-261, SEQ ID No. 3),
   [0167] c) V78I, A82E and F87A (BM3-263, SEQ ID No. 4),
   [0168] d) V78L, A82E and F87A (BM3-268, SEQ ID No. 5).
   [0169] e) V78Y, A82P and F87A (SEQ ID No. 6),
   [0170] f) V78M, A82P and F87A (SEQ ID No. 7),
   [0171] g) V78I, A82P and F87A (SEQ ID No. 8),
   [0172] h) V78L, A82P and F87A (SEQ ID No. 9),
   [0173] i) V78Y, A82Q and F87A (SEQ ID No. 10),
   [0174] j) V78M, A82Q and F87A (SEQ ID No. 11),
   [0175] k) V78I, A82Q and F87A (SEQ ID No. 12), or
   [0176] l) V78L, A82Q and F87A (SEQ ID No. 13),
   and at least one, two, three, four, five, six, seven, eight, nine or ten further mutation(s), and/or
[0177] (ii) at least the mutations
   [0178] a) V78F, A82E, F87A, M177Y and A184Y (SEQ ID No. 14),
   [0179] b) V78L, A82E, F87A, M177Y and A184Y (SEQ ID No. 15),
   [0180] c) V78I, A82E, F87A, M177Y and A184Y (SEQ ID No. 16),
   [0181] d) V78M, A82E, F87A, M177Y and A184Y (SEQ ID No. 17),
   [0182] e) V78Y, A82E, F87A, M177Y and A184Y (SEQ ID No. 18),
   [0183] f) V78F, A82P, F87A, M177Y and A184Y (SEQ ID No. 19),
   [0184] g) V78L, A82P, F87A, M177Y and A184Y (SEQ ID No. 20),
   [0185] h) V78I, A82P, F87A, M177Y and A184Y (SEQ ID No. 21),
   [0186] i) V78M, A82P, F87A, M177Y and A184Y (SEQ ID No. 22),
   [0187] j) V78Y, A82P, F87A, M177Y and A184Y (SEQ ID No. 23),
   [0188] k) V78F, A82Q, F87A, M177Y and A184Y (SEQ ID No. 24),
   [0189] l) V78L, A82Q, F87A, M177Y and A184Y (SEQ ID No. 25),
   [0190] m) V78I, A82Q, F87A, M177Y and A184Y (SEQ ID No. 26),
   [0191] n) V78M, A82Q, F87A, M177Y and A184Y (SEQ ID No. 27),
   [0192] o) V78Y, A82Q, F87A, M177Y and A184Y (SEQ ID No. 28),
   [0193] p) V78L, A82E, F87A, S72G, M177Y, V178P, L181Y, A184Y and L188F (SEQ ID No. 117),
   [0194] q) V78L, A82E, F87A, S72G, T146F, M177Y, V178W, L181Y and A184Y (SEQ ID No. 118), or
   [0195] r) V78L, A82E, F87A, S72G, T146F, M177Y, V178W, L181Y, A184Y, G457S, I458G and A477N (SEQ ID No. 119),
said BM3 variant having a selectivity factor for the C19 hydroxylation of a steroid or steroid derivative > 0.1, preferably > 0.2 or > 0.3, even more preferably > 0.4 or > 0.5, most preferably > 0.5, > 0.6, > 0.7, > 0.8 or > 0.9. Preferably, the BM3 variant is furthermore characterized by a product yield for the C19 hydroxylation of a steroid or steroid derivative > 5%, more preferably > 8%, >10%, or > 12%, even more preferably > 15%, >20%, >25%, > 30%, >35%, > 40%, > 45%, or > 50%, most preferably > 55%, > 60%, > 65 %, > 70%, or > 75%.

[0196] The P450-BM3 parent variants, in particular the variants according to SEQ ID No. 2 to 5 and variants derived thereof catalyze not only C19 hydroxylation but also further oxidative reactions. Significant generation of products with C19-hydroxylation and an additional oxidation in other positions of the steroid molecule was observed. With testosterone as substrate (2beta)-2,19-dihydroxytestosterone and (15beta)-15,19-dihydroxytestosterone were isolated, with delta-1-testosterone as substrate (1beta,2beta)-1,2-epoxy-19-hydroxytestosterone was isolated.

[chemical structure]

[0197] Thus, for example the P450-BM3 variants may catalyze formation of (6beta)-OH, (15beta)-OH or (1 beta,2beta)-1 ,2-epoxy derivatives either instead of or in combination with C19 hydroxylation (see Examples 8, 9, Tables E3, E5). The formation of these side products leads to an impaired selectivity factor. However, for the listed BM3 parent variants it was surprisingly found that even where side reactions occur, the resulting C19 hydroxylation (overoxidation) products may still be relevant for the commercial steroid synthesis. Compared with their respective parent variant the variants according to the fourth embodiment of the first aspect were superior with regard to selectivity.

[0198] Table B1 shows estradiol selectivity factors for d1-testosterone to estradiol conversion from 50 mg/L substrate for variants derived from the parent type BM3-268 (SEQ ID No. 5) having further mutations as depicted.

| Mutation | SF (Estradiol) | Mutation | SF (Estradiol) | Mutation | SF (Estradiol) | Mutation | SF (Estradiol ) |
|---|---|---|---|---|---|---|---|
| V26E | 0.58 | L188H | 0.14 | M177N | 0.09 | V26G | 0.07 |
| A74I | 0.53 | I263L | 0.14 | H266V | 0.09 | L86M | 0.07 |
| G85L | 0.48 | V178D | 0.14 | E64V | 0.09 | T146C | 0.07 |
| A74V | 0.42 | T146M | 0.14 | M118N | 0.09 | E143M | 0.07 |
| I263C | 0.42 | S72C, A74I | 0.14 | A321N | 0.09 | V48F | 0.07 |
| V178P | 0.42 | T327L | 0.14 | M118L | 0.09 | R50I | 0.07 |
| S72G, A74V | 0.40 | L29Q | 0.14 | E143R | 0.09 | A321D | 0.07 |
| F77A | 0.38 | S72N, A74I | 0.14 | L75I, F81G | 0.09 | R255L | 0.07 |
| A184G | 0.37 | G415S | 0.13 | L188A | 0.09 | M118V | 0.07 |
| M177Y | 0.37 | S89Q | 0.13 | T365W | 0.09 | L29A | 0.07 |
| A330V | 0.36 | T365V | 0.13 | T49C | 0.09 | T365K | 0.07 |
| A184Y | 0.34 | L75V, F81L | 0.13 | E143D | 0.09 | E64Y | 0.07 |
| A74T | 0.33 | S176C | 0.13 | V178K | 0.09 | L29I | 0.07 |
| H266S | 0.32 | L75I, F81L | 0.13 | V48T | 0.09 | L181H | 0.07 |
| T146F | 0.31 | G402A | 0.13 | V178R | 0.09 | T49F | 0.07 |
| A184R | 0.31 | V314H | 0.13 | M118P | 0.09 | V48R | 0.07 |
| A184F | 0.31 | T365Y | 0.13 | R50E | 0.09 | V178N | 0.07 |
| R50S, A74V | 0.31 | M177T | 0.13 | G415T | 0.09 | S72D, A74C | 0.07 |
| S72G, A74I | 0.30 | T365P | 0.13 | M177L | 0.09 | E267R | 0.07 |
| A74C | 0.29 | L188D | 0.13 | S72N, A74V | 0.09 | K224I | 0.07 |
| M185V | 0.29 | L262Y | 0.13 | R50G | 0.09 | S176Q | 0.07 |
| A330R | 0.28 | P392V | 0.13 | V48W | 0.09 | L75V | 0.07 |
| M177K | 0.28 | A74S | 0.13 | R47L | 0.09 | L75I, F81V | 0.07 |
| L188K | 0.28 | F77C | 0.13 | R50N | 0.09 | V48L | 0.07 |
| I263N | 0.27 | L188M | 0.13 | F81Y | 0.09 | R47A | 0.07 |
| A184W | 0.27 | 1263H, A264G | 0.13 | F77H | 0.09 | E143A | 0.07 |
| A74M | 0.27 | R50Q | 0.12 | E143F | 0.09 | L78M | 0.07 |
| S89L | 0.27 | R255I | 0.12 | S176F | 0.09 | A330T | 0.07 |
| K224P | 0.26 | S72G, A74Y | 0.12 | L75I, F81Y | 0.09 | V48I | 0.07 |
| V48H | 0.26 | V178I | 0.12 | F261I | 0.09 | S176K | 0.07 |
| V26N | 0.26 | W90D | 0.12 | F77D | 0.09 | | |
| A399I | 0.26 | L75I, F81S | 0.12 | A184L | 0.09 | | |
| A74L | 0.26 | P392G | 0.12 | F77N | 0.09 | | |
| A184E | 0.25 | V314S | 0.12 | F261M | 0.09 | | |
| F77V | 0.25 | V178M | 0.12 | E143C | 0.09 | | |
| F77S | 0.24 | A74R | 0.12 | F77I | 0.09 | | |
| V178W | 0.24 | M177F | 0.12 | V26M | 0.08 | | |
| V26H | 0.24 | A74G, L75C | 0.12 | V178S | 0.08 | | |
| L181P | 0.23 | L29S | 0.12 | V314A | 0.08 | | |
| F77L | 0.23 | L75I, F81H | 0.12 | R47K | 0.08 | | |
| F77W | 0.23 | I263K | 0.12 | T49N | 0.08 | | |
| A184D | 0.22 | A399M | 0.12 | R50P | 0.08 | | |
| S72W | 0.22 | V178L | 0.12 | L75I, F81C | 0.08 | | |
| M177V | 0.22 | F261V | 0.12 | F77R | 0.08 | | |
| V178Y | 0.22 | S72Y, A74V | 0.12 | L29H | 0.08 | | |
| A74H | 0.21 | A399C | 0.12 | T49W | 0.08 | | |
| L181V | 0.21 | S72C, A74L | 0.12 | V48D | 0.08 | | |
| A74C, L75V | 0.21 | L188E | 0.11 | A399N | 0.08 | | |
| S176P | 0.21 | G415D | 0.11 | R47Q | 0.08 | | |
| F77T | 0.21 | T49I | 0.11 | E64G | 0.08 | | |
| S89E | 0.20 | M118F | 0.11 | V26K | 0.08 | | |
| M177R | 0.20 | L75V, F81C | 0.11 | R50M | 0.08 | | |
| T49R | 0.20 | T88C | 0.11 | A321V | 0.08 | | |
| A74Y | 0.20 | E143W | 0.11 | R50V | 0.08 | | |
| A74W | 0.20 | V314P | 0.11 | V314Q | 0.08 | | |
| M177C | 0.20 | F81W | 0.11 | E64H | 0.08 | | |
| S72C, A74V | 0.20 | L181I | 0.11 | P392R | 0.08 | | |
| L188R | 0.20 | S89V | 0.11 | M185L | 0.08 | | |
| A74F | 0.20 | T438V | 0.11 | L188S | 0.08 | | |
| F77K | 0.20 | S176D | 0.11 | V26L | 0.08 | | |
| A74R, L75V | 0.19 | L86V | 0.11 | F81L | 0.08 | | |
| F261D | 0.19 | L29F | 0.11 | L29Y | 0.08 | | |
| L188N | 0.19 | I401T | 0.11 | R50L | 0.08 | | |
| S89T | 0.19 | A184Q | 0.11 | V371P | 0.08 | | |
| L188W | 0.19 | A321G | 0.11 | E267D | 0.08 | | |
| M177H | 0.19 | M118Y | 0.11 | L262W | 0.08 | | |
| T49P | 0.19 | W90Y | 0.11 | A399Q | 0.08 | | |
| F81S | 0.19 | L262I | 0.11 | M177A | 0.08 | | |
| A184K | 0.18 | T146R | 0.11 | E143G | 0.08 | | |
| A184N | 0.18 | L29C | 0.11 | V371A | 0.08 | | |
| M177Q | 0.18 | P392Q | 0.10 | M177P | 0.08 | | |
| L75H, F81S | 0.18 | A399E | 0.10 | S72N, A74C | 0.08 | | |
| S89C | 0.18 | H266E | 0.10 | R50S | 0.08 | | |
| S89M | 0.18 | S72C, A74Y | 0.10 | S176E | 0.08 | | |
| L188F | 0.18 | T49A | 0.10 | E143I | 0.08 | | |
| L181Y | 0.18 | S72C, A74C | 0.10 | T49Q | 0.08 | | |
| V178Q | 0.18 | L75V, F81Y | 0.10 | T365G | 0.07 | | |
| F77E | 0.18 | T365I | 0.10 | F77M | 0.07 | | |
| F261C | 0.17 | F77P | 0.10 | R50C | 0.07 | | |
| L188I | 0.17 | R50Y | 0.10 | T146D | 0.07 | | |
| F261S | 0.17 | S72G, A74F | 0.10 | R47H | 0.07 | | |
| S72G, A74C | 0.17 | M118E | 0.10 | R255K | 0.07 | | |
| A399V | 0.17 | S72H, A74C | 0.10 | E143V | 0.07 | | |
| A330K | 0.17 | A74P | 0.10 | R255P | 0.07 | | |
| S72G, A74H | 0.17 | V26I | 0.10 | V48Y | 0.07 | | |
| F261A | 0.16 | E64Q | 0.10 | V314F | 0.07 | | |
| S176M | 0.16 | L75V, F81I | 0.10 | A330F | 0.07 | | |
| A74N | 0.16 | V314E | 0.10 | Y51W | 0.07 | | |
| S176G | 0.16 | T146P | 0.10 | M118A | 0.07 | | |
| T365Q | 0.16 | T49L | 0.10 | E143P | 0.07 | | |
| S89N | 0.16 | M177E | 0.10 | T49D | 0.07 | | |
| G415A | 0.15 | L29T | 0.10 | E143K | 0.07 | | |
| A264V | 0.15 | T327V | 0.10 | R255N | 0.07 | | |
| S89I | 0.15 | H266N | 0.10 | H266A | 0.07 | | |
| T49V | 0.15 | V48S | 0.10 | F261Y | 0.07 | | |
| M118G | 0.15 | R50D | 0.10 | T365L | 0.07 | | |
| K224H | 0.15 | G85A | 0.09 | L29M | 0.07 | | |
| S72G, A74L | 0.15 | L437I | 0.09 | L75I | 0.07 | | |
| A184H | 0.15 | F77Y | 0.09 | V26A | 0.07 | | |
| A330W | 0.15 | T146S | 0.09 | L29V | 0.07 | | |
| S72G, A74S | 0.14 | M118W | 0.09 | R47T | 0.07 | | |

[0199] Table B2 shows estradiol selectivity factors for Δ1-testosterone to estradiol conversion from 100 mg/L substrate for variants derived from the parent type BM3-268; M177Y, A184Y (SEQ ID No. 15) having further mutations as depicted.

| Mutation | SF Estradiol | Mutation | SF Estradiol | Mutation | SF Estradiol |
|---|---|---|---|---|---|
| L150W | 0.65 | T49I | 0.51 | F205Y | 0.47 |
| L78M | 0.64 | F205G | 0.51 | K210E | 0.47 |
| W325Y | 0.61 | A330W | 0.51 | L20I | 0.47 |
| L20W | 0.60 | L20N | 0.50 | F205R | 0.46 |
| E93G | 0.59 | F205H | 0.50 | T49A | 0.46 |
| T149P | 0.59 | F205D, D208N | 0.50 | L20D | 0.46 |
| V26Q | 0.57 | L150Y | 0.50 | L20V | 0.46 |
| W325F | 0.56 | E267D | 0.50 | L20S | 0.46 |
| M212F | 0.55 | L20C | 0.49 | L20M | 0.45 |
| S89T | 0.55 | T146L | 0.49 | T146A, F205G | 0.45 |
| M212W | 0.54 | M212Y | 0.49 | R47W | 0.45 |
| L20T | 0.54 | F205T | 0.49 | T146A, L272W | 0.45 |
| L150F | 0.53 | L20R | 0.49 | F205W | 0.45 |
| A330Y | 0.53 | F77V | 0.48 | R47S | 0.45 |
| L20F | 0.53 | F205E | 0.48 | T327M | 0.43 |
| T49P | 0.52 | T49L | 0.48 | F205K | 0.42 |
| L20P | 0.52 | T146V, A191T | 0.47 | T146A, L150A | 0.42 |
| L272V | 0.52 | F205D | 0.47 | E352N | 0.38 |
| L20Y | 0.51 | P9S | 0.47 | | |

[0200] Table B3 shows selectivity factors for estradiol obtained in biotransformation reactions from 100 mg/L Δ1-testosterone as substrate with BM3-268; M177Y, A184Y (SEQ ID No. 15) variants having up to six mutations.

| Mutations | SF Estradiol | Mutations | SF Estradiol |
|---|---|---|---|
| S72G,A741,V178P,L181Y | 0.83 | S72G,V178P,L181Y,L188F | 0.61 |
| S72G,A74V,V178P,L181Y,L188K | 0.83 | S72G,V178W,L188R | 0.61 |
| A74V,V178P,L181Y,L188R | 0.83 | T146F,L181Y | 0.6 |
| S72G,A74V,T146F,V178P,L181Y,L188 R | 0.82 | T146F,V178W,L188R | 0.59 |
| A74V,V178P,L181Y,L188K | 0.8 | S72G,T146F,V178W | 0.59 |
| S72G,A74V,T146F,V178P,L181Y,L188 K | 0.8 | T146F,L181Y,L188F | 0.58 |
| S72G,A74V,T146F,V178P,L181Y | 0.79 | A74T,T146F,L181Y,L188K | 0.58 |
| S72G,A741,T146F,L181Y,L188F | 0.77 | A74T,T146F,V178W | 0.58 |
| S72G,A74V,T146F,V178W,L181Y | 0.76 | V178P | 0.58 |
| S72G,A74T,T146F,V178W,L188R | 0.76 | S72G,A74T,T146F,L188R | 0.58 |
| S72G,A74V,T146F,L181Y,L188R | 0.75 | S72G,V178P,L181Y,L188K | 0.57 |
| S72G,A74V,T146F,L181Y | 0.75 | S72G,V178W,L188F | 0.57 |
| A74V,V178P,L181Y,L188F | 0.74 | S72G,V178P,L181Y,L188R | 0.56 |
| S72G,A74T,T146F,V178W,L181Y,L18 8R | 0.73 | S72G,T146F,V178W,L181Y,L188 K | 0.56 |
| S72G,A74V,T146F,V178W,L188R | 0.72 | S72G,T146F,V178W,L188K | 0.55 |
| A74T,T146F,V178P,L181Y | 0.72 | T146F,V178W,L181Y,L188R | 0.55 |
| A741,T146F,V178W | 0.68 | V178P,L181Y,L188R | 0.55 |
| S72G,A74T,T146F,L181Y,L188K | 0.68 | T146F,V178W,L188F | 0.55 |
| S72G,A74T,L181Y,L188F | 0.68 | S72G,A74V,L188R | 0.55 |
| S72G,A74T,T146F,V178P,L181Y | 0.68 | S72G,A74T,V178P,L188F | 0.55 |
| S72G,A74T,T146F,V178W,L188F | 0.67 | S72G,T146F,V178P,L188R | 0.54 |
| S72G,T146F,V178W,L188F | 0.66 | S72G,V178W,L188K | 0.53 |
| S72G,A74I,T146F,L181Y,L188K | 0.66 | V178W | 0.53 |
| S72G,A74I,T146F,L181Y,L188R | 0.66 | S72G,V178W | 0.52 |
| S72G,V178P,L181Y | 0.65 | S72G,T146F,L188F | 0.52 |
| A74T,T146F,L181Y,L188R | 0.65 | S72G,T146F,L181Y,L188R | 0.52 |
| V178P,L181Y | 0.65 | A74T,T146F,V178P,L188R | 0.51 |
| S72G,V178W,L181Y | 0.65 | T146F,V178W | 0.49 |
| S72G,T146F,V178W,L181Y,L188F | 0.63 | S72G | 0.47 |
| S72G,T146F,V178W,L181Y | 0.63 | A74T,T146F,L188K | 0.47 |
| S72G,A74T,L181Y,L188K | 0.63 | T146F,V178W,L188K | 0.46 |
| S72G,A74I,T146F,L181Y | 0.63 | S72G,L188F | 0.46 |
| S72G,A74V,T146F,V178W | 0.62 | S72G,T146F | 0.46 |

[0201] Table B4 shows estrone selectivity factors for ADD to estrone conversion from 100 mg/L substrate for variants derived from the parent type BM3-268; M177Y, A184Y (SEQ ID No. 15) having further mutations as depicted.

| Mutation(s) | SF Estrone | Mutation(s) | SF Estrone | Mutation(s) | SF Estrone |
|---|---|---|---|---|---|
| I259M | 0.75 | T146A, F205G | 0.29 | L20R | 0.23 |
| L150W | 0.72 | F205E | 0.29 | F205W | 0.23 |
| L272C | 0.65 | F205S | 0.29 | V26S | 0.23 |
| F205D | 0.45 | M354Q | 0.29 | E352A | 0.23 |
| F205N | 0.44 | W325Y | 0.29 | E352I | 0.23 |
| R203C | 0.44 | F205I | 0.28 | M212F | 0.22 |
| F205V | 0.42 | F205G | 0.28 | M212T | 0.22 |
| E93G | 0.41 | M212H | 0.28 | L272W | 0.21 |
| F173Y, I174F | 0.40 | T438V | 0.28 | E352M | 0.20 |
| F205T | 0.39 | T438C | 0.27 | L150F | 0.20 |
| M212Y | 0.37 | M354W | 0.27 | T49Q | 0.20 |
| F205P | 0.36 | T49R | 0.27 | L272Y | 0.20 |
| L78M | 0.36 | T327M | 0.27 | L20F | 0.20 |
| F205Y | 0.34 | F81Y | 0.27 | T146F | 0.20 |
| F205D, D208N | 0.34 | F205R | 0.26 | L150G | 0.19 |
| M212W | 0.34 | S89T | 0.26 | K210E | 0.19 |
| T146L | 0.32 | I259D | 0.26 | T49I | 0.18 |
| D363G, T438C | 0.31 | L150Y | 0.25 | F81D | 0.18 |
| F205K | 0.31 | L20Y | 0.24 | L20P | 0.17 |
| L20W | 0.30 | T438I | 0.24 | L272F | 0.16 |
| F205C | 0.30 | F205H | 0.24 | E352N | 0.15 |
| T146A, L272H | 0.30 | E352V | 0.24 | | |

[0202] Table B5 shows the selectivity factor for estrone obtained in biotransformation reactions from 100 mg/L ADD with BM3-268; M177Y, A184Y (SEQ ID No. 15) derived variants having up to six mutations.

| Mutation(s) | SF Estr one | Mutation(s) | SF Estr one | Mutation(s) | SF Estr one |
|---|---|---|---|---|---|
| S72G,A74V,V1 78P,L181Y ,L188F | 0.94 | S72G,A74T,L188R | 0.54 | S72G,A741,T146F,V178P, L188F | 0.37 |
| S72G,A74V,L181Y,L188F | 0.88 | A74V,V178P,L181Y,L18 8F | 0.54 | T146F,V178W,L188F | 0.37 |
| S72G,A74V,T146F,V178P ,L181Y,L188K | 0.85 | S72G,L181Y,L188R | 0.53 | S72G,L181Y,L188F | 0.37 |
| S72G,A74T,V178P,L181Y | 0.84 | S72G,A74T,T146F,V178 P,L181Y | 0.53 | A74I,T146F,V178P | 0.36 |
| S72G,A74V,T146F,V178P ,L181Y,L188R | 0.83 | S72G,T146F,L181Y,L18 8R | 0.52 | S72G,A74I,T146F,L181Y | 0.36 |
| S72G,A74V,T146F,L181Y ,L188K | 0.83 | S72G,A74V,T146F,L181 Y,L188R | 0.52 | S72G,L181Y | 0.36 |
| S72G,A74V,T146F,V178 W,L181Y,L188K | 0.82 | A74T,T146F,V178P,L18 1Y | 0.51 | S72G,A74T,T146F,V178 W,L181Y,L188F | 0.36 |
| S72G,A74V,V178W,L181 Y | 0.81 | S72G,V178P,L188F | 0.50 | S72G,A74V,T146F,V178 P | 0.36 |
| S72G,A74V,V178W,L181 Y,L188F | 0.79 | A74T,T146F,V178W,L18 8R | 0.50 | S72G,A74T,T146F,V178P ,L188F | 0.35 |
| S72G,A74T,T146F,V178 W,L181Y | 0.78 | S72G,L181Y,L188K | 0.49 | S72G,A74V,V178P,L188 R | 0.34 |
| S72G,A74I,T146F,V178W ,L181Y | 0.78 | S72G,A74I,V178P,L181 Y | 0.49 | S72G,T146F,V178P,L181 Y,L188F | 0.34 |
| S72G,A74V,T146F,V178 W,L181Y,L188R | 0.78 | S72G,A74V,V178P,L188 F | 0.49 | V178P,L181Y | 0.33 |
| S72G,A741,T146F,V178P, L181Y,L188R | 0.77 | S72G,T146F,L188F | 0.49 | S72G,V178W,L181Y,L18 8F | 0.33 |
| S72G,A74V,T146F,L181Y ,L188F | 0.76 | S72G,V178P,L181Y,L18 8F | 0.48 | S72G,A74I,T146F,V178P | 0.32 |
| S72G,V178W,L181Y | 0.75 | S72G,A74T,T146F,V178 P | 0.48 | S72G,T146F,L188R | 0.32 |
| S72G,V178W,L181Y,L188 R | 0.73 | S72G,V178W,L188R | 0.48 | T146F,V178P | 0.32 |
| S72G,A74V,T146F,V178P ,L181Y | 0.71 | S72G,A74T,T146F,V178 P,L188R | 0.48 | S72G,A74T,T146F,L181Y | 0.32 |
| S72G,A74I,T146F,V178W ,L181Y,L188K | 0.71 | S72G,T146F,V178W,L18 1Y,L188K | 0.47 | T146F,V178W,L181Y,L18 8R | 0.31 |
| S72G,T146F,V178W,L181 Y | 0.69 | S72G,A741,T146F,V178 P,L181Y | 0.47 | S72G,V178P,L188K | 0.31 |
| S72G,A74T,T146F,V178 W,L181Y,L188K | 0.69 | S72G,T146F,V178P,L18 1Y,L188K | 0.47 | S72G,L188F | 0.31 |
| A74I,T146F,V178W,L188 R | 0.69 | S72G,T146F,V178P,L18 1Y | 0.45 | S72G,V178P,L181Y,L188 K | 0.30 |
| S72G,A74T,V178P,L181Y ,L188K | 0.68 | S72G,T146F,L188K | 0.44 | S72G,A74T,V178P,L188F | 0.29 |
| S72G,T146F,V178W,L181 Y,L188F | 0.67 | S72G,A74T,T146F,L181 Y,L188K | 0.43 | S72G,T146F,V178P,L188 R | 0.29 |
| S72G,A74V,T146F,V178P ,L188F | 0.66 | S72G,A74V,T146F,V178 W,L188R | 0.43 | S72G,A74V,V178P | 0.29 |
| S72G,A74V,T146F,L188F | 0.66 | S72G,V178P,L188R | 0.42 | V178P | 0.29 |
| S72G,A74T,T146F,V178 W,L188R | 0.65 | T146F,L181Y,L188F | 0.42 | S72G,A741,T146F,V178P, L188R | 0.29 |
| S72G,A74V,L181Y | 0.65 | T146F,L181Y | 0.41 | S72G,V178W | 0.29 |
| S72G,T146F,V178W,L188 F | 0.64 | S72G,T146F,V178W,L18 8K | 0.41 | A74I,T146F,L181Y,L188K | 0.29 |
| S72G,A74V,T146F,V178 W,L181Y | 0.64 | A74T,T146F,V178P | 0.41 | A74T,T146F,L181Y,L188 K | 0.28 |
| S72G,A74T,L181Y,L188R | 0.64 | S72G,A74V,T146F,V178 P,L188R | 0.41 | S72G,A74V,V178P,L181 Y,L188R | 0.28 |
| S72G,T146F,V178W,L188 R | 0.63 | T146F,L181Y,L188K | 0.41 | S72G,L188R | 0.27 |
| A74T,T146F,V178W,L181 Y | 0.63 | S72G,T146F | 0.40 | S72G,A74V,T146F,V178 P,L188K | 0.27 |
| S72G,A74I,T146F,L181Y, L188F | 0.63 | S72G | 0.40 | S72G,A74V,L188R | 0.26 |
| S72G,A74V,T146F,L181Y | 0.62 | S72G,A741,T146F,V178 P,L188K | 0.40 | S72G,T146F,V178P,L188 K | 0.26 |
| S72G,A74T,T146F,V178 W,L181Y,L188R | 0.61 | S72G,A741,T146F,V178 P,L181Y,L188F | 0.40 | A741,T146F,V178W,L188 K | 0.26 |
| S72G,T146F,L181Y,L188 K | 0.61 | S72G,T146F,L181Y | 0.40 | T146F,V178P,L181Y,L18 8R | 0.25 |
| A741,T146F,L181Y | 0.61 | A74I,T146F,V178P,L188 R | 0.40 | T146F,V178W | 0.25 |
| S72G,T146F,V178W | 0.59 | A74V,T146F,L181Y,L188 R | 0.40 | A74T,T146F,V178W | 0.25 |
| S72G,T146F,L181Y,L188 F | 0.59 | S72G,A74V,T146F,V178 W | 0.39 | S72G,L188K | 0.24 |
| S72G,T146F,V178P,L188 F | 0.56 | S72G,V178P | 0.39 | S72G,A74V,L188K | 0.24 |
| S72G,V178W,L188K | 0.56 | S72G,A74I,T146F,L181Y ,L188R | 0.39 | T146F,V178W,L188R | 0.23 |
| S72G,T146F,V178P | 0.55 | S72G,V178P,L181Y | 0.38 | T146F,V178W,L188K | 0.21 |
| S72G,V178W,L188F | 0.55 | S72G,V178P,L181Y,L18 8R | 0.38 | T146F | 0.20 |
| S72G,A74T,T146F,V178P ,L188K | 0.55 | A74T,T146F,V178P,L18 8K | 0.38 | | |
| S72G,A74T,T146F,V178 W,L188F | 0.54 | S72G,T146F,V178P,L18 1Y,L188R | 0.37 | | |

[0203] Table B6 shows the target product ratio (TPR) for ADD to estrone conversion from 2000 mg/L substrate for variants derived from the parent type BM3-268; M177Y, A184Y; S72G, V178P, L181Y, L188F (SEQ ID No. 117) having further mutations as depicted.

| Mutation | TPR Estrone (%) | Mutation | TPR Estrone (%) | Mutation | TPR Estrone (%) | Mutation | TPR Estrone (%) |
|---|---|---|---|---|---|---|---|
| R79K | 76.80 | D182W | 58.98 | G240H | 54.09 | T175R | 51.15 |
| R179L | 74.43 | K76E | 58.51 | T269A | 54.01 | Q404F | 51.10 |
| I174V | 70.26 | N186L | 58.42 | E140K | 54.01 | Q189V | 51.07 |
| K187N | 67.17 | T175Q | 58.42 | H236G | 54.01 | V299L | 51.03 |
| R179M | 65.99 | A44Q | 58.41 | H236P | 53.97 | H92Y | 50.93 |
| K440C | 65.82 | T175M | 58.25 | A225S | 53.86 | R190W | 50.61 |
| F173W | 65.23 | H236C | 58.23 | G114C | 53.81 | S270D | 50.56 |
| D182A | 64.50 | T269V | 58.21 | S176D | 53.74 | E140T | 50.47 |
| N186K | 64.40 | N186Y | 58.09 | E409N | 53.71 | Q189I | 50.31 |
| D182I | 64.27 | V299W | 58.05 | R190S | 53.68 | G114K | 50.30 |
| K76V | 63.28 | R190K | 57.79 | T175G | 53.63 | S53C | 50.24 |
| D182H | 62.78 | K187G | 57.79 | G114L | 53.61 | A225V | 50.06 |
| R179A | 62.59 | G240A | 57.78 | A225G | 53.39 | N186E | 50.02 |
| D182E | 62.29 | G240R | 57.66 | M5P | 53.22 | H236F | 50.01 |
| D182V | 62.26 | H236I | 57.50 | N186V | 53.02 | Q189K | 49.82 |
| D182C | 62.21 | A399R | 57.44 | E140D | 52.94 | A225N | 49.79 |
| K76I | 62.18 | Q73F | 57.39 | K76H | 52.86 | K76C | 49.74 |
| G240S | 61.85 | N186A | 57.23 | G240C | 52.86 | Q73A | 49.62 |
| I258L | 61.68 | K440T | 57.21 | K187A | 52.78 | H236R | 49.59 |
| R190V | 61.58 | P172G | 56.97 | R179V | 52.77 | A225Y | 49.58 |
| Q73L | 61.26 | A225T | 56.85 | R190G | 52.74 | G240N | 49.45 |
| N186M | 61.23 | G114N | 56.33 | Q73W | 52.67 | T175H | 49.43 |
| Q403R | 61.19 | N186F | 55.94 | R190C | 52.45 | G46T | 49.27 |
| T175F | 61.08 | H236K | 55.94 | S270G | 52.40 | I258V | 49.20 |
| T175Y | 61.06 | D182M | 55.78 | T175N | 52.37 | H236A | 49.15 |
| H236Y | 61.01 | Q73T | 55.69 | G240M | 52.11 | M5C | 49.13 |
| K440N | 61.00 | G240Q | 55.69 | I174T | 52.08 | K76L | 49.12 |
| H236D | 60.98 | E140A | 55.42 | S270A | 51.99 | E183T | 49.08 |
| Q403K | 60.90 | K76N | 55.22 | A225Q | 51.90 | A44G | 49.03 |
| R190M | 60.87 | H236S | 55.17 | R179P | 51.77 | E337L | 48.74 |
| R190N | 59.98 | Q73E | 54.76 | Q73S | 51.75 | K187R | 48.64 |
| K76F | 59.97 | R179H | 54.69 | N186Q | 51.68 | M5E | 48.63 |
| P172A | 59.90 | I258M | 54.67 | E140M | 51.65 | R79E | 48.59 |
| N186T | 59.83 | G114W | 54.67 | M5Q | 51.59 | G240V | 48.49 |
| N186H | 59.68 | D182N | 54.47 | N186D | 51.43 | | |
| T175L | 59.57 | P172D | 54.40 | H92F | 51.29 | | |
| G240K | 59.46 | Q404Y | 54.31 | A225C | 51.22 | | |

[0204] Provided are variants according to a fifth embodiment according to the first aspect, wherein said P450-BM3 variant comprises further mutation(s) at at least one, two, three, four, five, six, seven, eight, nine, ten or more position(s). In particular, the variants according to the fifth embodiment can be variants according to the first or second embodiment of the first aspect, such as variants derived from variants according to SEQ ID No. 2, 3, 4, 5, 6, 7, 8, 9, 10, 11, 12, 13, 14, 15, 16, 17, 18, 19, 20, 21, 22, 23, 24, 25, 26, 27, 28, 117, 118 or 119.

[0205] Preferrably, said position(s) are selected from (A184), (A191), (A221), (A264), (A321), (A328), (A33), (A330), (A399), (A74), (D168), (D208), (D222), (D363), (E13), (E143), (E267), (E352), (E64), (E82), (E93), (F173), (F205), (F261), (F331), (F393), (F77), (F81), (G240), (G271), (G402), (G415), (G570), (G677), (G85), (H266), (H659), (I153), (I174), (I258), (I259), (I263), (I401), (K210), (K224), (L150), (L181), (L188), (L20), (L262), (L272), (L29), (L324), (L333), (L356), (L437), (L75), (L78), (L86), (M118), (M177), (M185), (M212), (M354), (N70), (P243), (P326), (P329), (P392), (P9), (R147), (R161), (R190), (R203), (R255), (R323), (R47), (R50), (S164), (S176), (S54), (S72), (S89), (T146), (T149), (T260), (T268), (T269), (T327), (T365), (T436), (T438), (T49), (T88), (V178), (V26), (V299), (V314), (V371), (V48), (W325), (W367), (W90), (Y51), (A225), (A44), (D182), (D80), (E140), (E183), (E337), (E409), (G114), (G227), (G46), (H236), (H92), (K187), (K440), (K76), (M5), (N186), (P172), (Q189), (Q397), (Q403), (Q404), (Q73), (R179), (R79), (S270), (S53) and (T175).

[0206] Preferably said BM3 variant has an improved selectivity and/or product yield for C19 hydroxylation compared with its corresponding parent BM3 variant. Preferably, the BM3 variant comprises the mutations M177Y and/or A184Y.

[0207] It was surprisingly found that targeting the(se) position(s) and introducing a “suitable” amino acid exchange could further improve either product yield (cf. Tables A1, A2, A3, A4, A5, and A6) or selectivity (cf. Tables B1, B2, B3, B4, B5 and B6) of the C19 hydroxylation, thereby further improving the efficiency of the C19 hydroxylation process. Evaluation which amino acid is “suitable” for a position to obtain the improvement is easily feasible where the targeting position is disclosed herein. To evaluate which of the 20 amino acids is “suitable” for the given position, one simply has to mutate the given position by introducing the amino acid as known in the art (see also Example 1) and evaluate the performance of the obtained variant for C19 hydroxylation, e.g in comparison with the parent variant and/or in comparison with the remaining 18 amino acids.

[0208] There is provided a first preferred subset comprising variants according to the fifth embodiment, wherein the P450-BM3 variants have an improved product yield or product titer for C19 hydroxylation in comparison with the parent variant. Comprised within this subset are variants wherein said position(s) are selected from (A184), (A191), (A221), (A264), (A321), (A33), (A330), (A399), (A74), (D208), (D222), (D363), (E13), (E143), (E267), (E352), (E64), (E82), (E93), (F173), (F205), (F261), (F331), (F393), (F77), (F81), (G240), (G271), (G402), (G415), (G677), (G85), (H266), (H659), (I153), (I174), (I258), (I259), (I263), (I401), (K210), (K224), (L150), (L181), (L188), (L20), (L262), (L272), (L29), (L324), (L356), (L437), (L75), (L78), (L86), (M118), (M177), (M185), (M212), (M354), (N70), (P243), (P329), (P392), (P9), (R147), (R161), (R190), (R203), (R255), (R47), (R50), (S176), (S54), (S72), (S89), (T146), (T149), (T260), (T268), (T269), (T327), (T365), (T436), (T438), (T49), (T88), (V178), (V26), (V314), (V371), (V48), (W325), (W367), (W90), (Y51), (A225), (A44), (D182), (D80), (E140), (E183), (E337), (G114), (G227), (H236), (H92), (K187), (K440), (K76), (M5), (N186), (P172), (Q189), (Q397), (Q403), (Q404), (Q73), (R179), (R79), (S270), (S53), (T175) and (V299).

[0209] There is provided a second preferred subset comprising variants according to the fifth embodiment, wherein the P450-BM3 variants have an improved selectivity (as determined by SF or TPR) for C19 hydroxylation in comparison with the parent variant (see FIG. 1b). Comprised within this subset are variants wherein said position(s) are selected from (A184), (A191), (A221), (A264), (A321), (A328), (A33), (A330), (A399), (A74), (D168), (D208), (D222), (D363), (E143), (E267), (E352), (E64), (E82), (E93), (F173), (F205), (F261), (F331), (F393), (F77), (F81), (G240), (G271), (G402), (G415), (G570), (G677), (G85), (H266), (H659), (I153), (I174), (I258), (I259), (I263), (I401), (K210), (K224), (L150), (L181), (L188), (L20), (L262), (L272), (L29), (L324), (L333), (L356), (L437), (L75), (L78), (L86), (M118), (M177), (M185), (M212), (M354), (N70), (P243), (P326), (P329), (P392), (P9), (R147), (R161), (R190), (R203), (R255), (R323), (R47), (R50), (S164), (S176), (S54), (S72), (S89), (T146), (T149), (T260), (T268), (T269), (T327), (T365), (T436), (T438), (T49), (T88), (V178), (V26), (V299), (V314), (V48), (W325), (W367), (W90), (Y51), (A225), (A44), (D182), (E140), (E183), (E337), (E409), (G114), (G46), (H236), (H92), (K187), (K440), (K76), (M5), (N186), (P172), (Q189), (Q403), (Q404), (Q73), (R179), (R79), (S270), (S53) and (T175).

[0210] There is provided a third preferred subset comprising variants according to the fifth embodiment, wherein the P450-BM3 variants have an improved selectivity (as determined by SF or TPR) and an improved product yield or product titer for C19 hydroxylation in comparison with the parent variant. Comprised within this subset are variants wherein said position(s) are selected from (A184), (A191), (A221), (A264), (A321), (A33), (A330), (A399), (A74), (D208), (D222), (D363), (E13), (E143), (E267), (E352), (E64), (E82), (E93), (F173), (F205), (F261), (F331), (F393), (F77), (F81), (G240), (G271), (G402), (G677), (G85), (H266), (H659), (I153), (I174), (I258), (I259), (I263), (I401), (K210), (K224), (L150), (L181), (L188), (L20), (L262), (L272), (L29), (L324), (L356), (L437), (L75), (L78), (L86), (M118), (M177), (M185), (M212), (M354), (N70), (P243), (P329), (P392), (P9), (R147), (R161), (R190), (R203), (R255), (R47), (R50), (S176), (S54), (S72), (S89), (T146), (T149), (T268), (T269), (T327), (T365), (T436), (T438), (T49), (T88), (V178), (V26), (V314), (V48), (W325), (W367), (W90), (Y51), (A225), (A44), (D182), (E140), (E337), (G114), (H236), (H92), (K187), (K440), (K76), (M5), (N186), (P172), (Q189), (Q403), (Q404), (Q73), (R179), (R79), (S270), (S53), (T175) and (V299).

[0211] The fifth embodiment and each of the subsets provided can be and is suggested to be combined with all previous embodiments, as understood by the skilled person, and may or may not be an embodiment according to the second embodiment of the first aspect.

[0212] Provided are variants according to a sixth embodiment according to the first aspect, wherein said P450-BM3 variant comprise at least one, two, three, four, five, six, seven, eight, nine, ten or more further mutations. In particular the variants according to the sixth embodiment can be variants according to the first or second embodiment of the first aspect, such as variants derived from variants according to SEQ ID No. 2, 3, 4, 5, 6, 7, 8, 9, 10, 11, 12, 13, 14, 15, 16, 17, 18, 19, 20, 21, 22, 23, 24, 25, 26, 27, 28, 117, 118 or 119. The sixth embodiment can be and is suggested to be combined with all previous embodiments, and may or may not be an embodiment according to the fifth embodiment.

[0213] Preferrably, said further mutation(s) according to the sixth embodiment of the first aspect are (A184D) or (A184D, L188K) or (A184E) or (A184F) or (A184G) or (A184H) or (A184I) or (A184K) or (A184L) or (A184N) or (A184Q) or (A184R) or (A184W) or (A184W, L188F) or (A184Y) or (A184Y, L188K) or (A184Y, R50S) or (A221S) or (A264V) or (A321C) or (A321D) or (A321E) or (A321G) or (A321I) or (A321N) or (A321T) or (A321V) or (A328P) or (A330C) or (A330D) or (A330E) or (A330F) or (A330G) or (A330H) or (A330I) or (A330K) or (A330L) or (A330M) or (A330N) or (A330Q) or (A330R) or (A330S) or (A330T) or (A330T, E352A) or (A330T, F331V) or (A330V) or (A330W) or (A330Y) or (A330Y, W367C) or (A33V) or (A399C) or (A399E) or (A399G) or (A399I) or (A399L) or (A399M) or (A399N) or (A399Q) or (A399R) or (A399S) or (A399T) or (A399V) or (A74C) or (A74C, L75V) or (A74D) or (A74D, F81V) or (A74E) or (A74F) or (A74G) or (A74G, L75C) or (A74H) or (A74I) or (A74I, A184W, L188F) or (A74I, F77A, L181Y, A184W) or (A74I, L181Y, L188K) or (A74I, L181Y, L188R) or (A74I, L188F) or (A74I, L188K) or (A74I, L188R) or (A74I, M177Y, A184R, L188F) or (A74I, M177Y, V178P, A184G) or (A74I, T146F) or (A74I, T146F, L181Y) or (A74I, T146F, L181Y, L188K) or (A74I, T146F, L181Y, L188R) or (A74I, T146F, L188F) or (A74I, T146F, L188K) or (A74I, T146F, V178P) or (A74I, T146F, V178P, L181Y, L188F) or (A74I, T146F, V178P, L181Y, L188K) or (A74I, T146F, V178P, L188K) or (A74I, T146F, V178P, L188R) or (A74I, T146F, V178W) or (A74I, T146F, V178W, L181Y, L188F) or (A74I, T146F, V178W, L181Y, L188R) or (A74I, T146F, V178W, L188F) or (A74I, T146F, V178W, L188K) or (A74I, T146F, V178W, L188R) or (A74I, V178P) or (A74I, V178P, L181Y) or (A74I, V178P, L181Y, L188R) or (A74I, V178P, L188F) or (A74I, V178P, L188K) or (A74I, V178P, L188R) or (A74I, V178W, L188F) or (A74I, V178W, L188K) or (A74I, V178W, L188R) or (A74K) or (A74L) or (A74M) or (A74N) or (A74P) or (A74Q) or (A74R) or (A74R, L75V) or (A74S) or (A74T) or (A74T, A184D) or (A74T, F77A, L181Y, A184D, L188K) or (A74T, F77A, V178W, A184Y) or (A74T, F77L, L181Y, A184D, L188K) or (A74T, L181Y) or (A74T, L181Y, A184D, L188K) or (A74T, L181Y, A184Y, L188K) or (A74T, L181Y, L188K) or (A74T, L181Y, L188R) or (A74T, L188K) or (A74T, M177Y, L181Y, A184D, L188K) or (A74T, T146F, L181Y, A184D, L188K) or (A74T, T146F, L181Y, L188K) or (A74T, T146F, L181Y, L188R) or (A74T, T146F, L188F) or (A74T, T146F, L188K) or (A74T, T146F, L188R) or (A74T, T146F, V178P) or (A74T, T146F, V178P, L181Y) or (A74T, T146F, V178P, L188K) or (A74T, T146F, V178P, L188R) or (A74T, T146F, V178W) or (A74T, T146F, V178W, L181Y) or (A74T, T146F, V178W, L181Y, L188K) or (A74T, T146F, V178W, L188R) or (A74T, V178P) or (A74T, V178P, L188F) or (A74T, V178P, L188K) or (A74T, V178P, L188R) or (A74T, V178W, L181Y, L188K) or (A74T, V178W, L188K) or (A74T, V178W, L188R) or (A74V) or (A74V, F77A, A184N, L188F) or (A74V, L181Y) or (A74V, L181Y, A184D, L188K) or (A74V, L181Y, A184W, L188F) or (A74V, L181Y, L188F) or (A74V, L188F) or (A74V, L188K) or (A74V, L75V) or (A74V, T146F, L181Y, L188K) or (A74V, T146F, L181Y, L188R) or (A74V, T146F, L188K) or (A74V, T146F, L188R) or (A74V, T146F, V178W) or (A74V, T146F, V178W, L181Y, L188F) or (A74V, V178P, A184W, L188K) or (A74V, V178P, L181Y, L188F) or (A74V, V178P, L181Y, L188K) or (A74V, V178P, L181Y, L188R) or (A74V, V178P, L188F) or (A74V, V178W, L188K) or (A74W) or (A74Y) or (D168Y, F173D) or (D363G, T438C) or (E13D, R47L) or (E143A) or (E143C) or (E143D) or (E143F) or (E143G) or (E143I) or (E143K) or (E143L) or (E143M) or (E143N) or (E143P) or (E143Q) or (E143R) or (E143S) or (E143V) or (E143W) or (E143Y) or (E267A) or (E267C) or (E267D) or (E267G) or (E267K) or (E267P) or (E267R) or (E267S) or (E267T) or (E267Y) or (E352A) or (E352D) or (E352F) or (E352G) or (E352I) or (E352L) or (E352M) or (E352N) or (E352P) or (E352R) or (E352S) or (E352T) or (E352V) or (E352W) or (E352Y) or (E64A) or (E64G) or (E64H) or (E64I) or (E64K) or (E64L) or (E64M) or (E64N) or (E64Q) or (E64V) or (E64W) or (E64Y) or (E82P) or (E93G) or (F173C) or (F173C, F205G) or (F173D) or (F173I) or (F173K) or (F173L) or (F173M) or (F173N) or (F173P) or (F173Q) or (F173R) or (F173S) or (F173S, F205P) or (F173V) or (F173W) or (F173Y) or (F173Y, I174F) or (F205A) or (F205C) or (F205D) or (F205D, D208N) or (F205E) or (F205G) or (F205H) or (F205I) or (F205K) or (F205L) or (F205M) or (F205N) or (F205P) or (F205R) or (F205S) or (F205T) or (F205V) or (F205W) or (F205Y) or (F261A) or (F261C) or (F261D) or (F261G) or (F261I) or (F261L) or (F261M) or (F261N) or (F261Q) or (F261S) or (F261T) or (F261V) or (F261W) or (F261Y) or (F331C) or (F331H) or (F331I) or (F331L) or (F331M) or (F331N) or (F331P) or (F331T) or (F331V) or (F331W) or (F331Y) or (F393M) or (F393W) or (F77A) or (F77A, A184W) or (F77A, L181P, A184Y, L188K) or (F77A, M177Y) or (F77C) or (F77D) or (F77E) or (F77G) or (F77H) or (F77I) or (F77K) or (F77L) or (F77M) or (F77N) or (F77P) or (F77R) or (F77S) or (F77T) or (F77V) or (F77V, L86M) or (F77W) or (F77Y) or (F81A) or (F81C) or (F81D) or (F81I) or (F81L) or (F81P) or (F81R) or (F81S) or (F81T) or (F81V) or (F81W) or (F81Y) or (G271A) or (G271C) or (G271D) or (G271E) or (G271F) or (G271H) or (G271K) or (G271L) or (G271M) or (G271N) or (G271P) or (G271Q) or (G271R) or (G271S) or (G271T) or (G271V) or (G271W) or (G271Y) or (G402A) or (G415A) or (G415D) or (G415S) or (G415T) or (G415V) or (G85A) or (G85L) or (G85S) or (H266A) or (H266C) or (H266D) or (H266E) or (H266F) or (H266G) or (H266I) or (H266K) or (H266M) or (H266N) or (H266P) or (H266Q) or (H266R) or (H266S) or (H266T) or (H266V) or (H266W) or (H266Y) or (I153F, G271L) or (I153L) or (I153L, F173Y) or (I259A) or (I259C) or (I259D) or (I259F) or (I259G) or (I259H) or (I259K) or (I259L) or (I259M) or (I259N) or (I259Q) or (I259S) or (I259T) or (I259V) or (I259W) or (I259Y) or (I263A) or (I263C) or (I263E) or (I263F) or (I263G) or (I263H, A264G) or (I263K) or (I263L) or (I263M) or (I263N) or (I263Q) or (I263S) or (I263T) or (I263V) or (I263Y) or (I401A) or (I401L) or (1401M) or (I401T) or (I401V) or (K210E) or (K210T, G271V) or (K224C) or (K224E) or (K224F) or (K224H) or (K224I) or (K224L) or (K224M) or (K224P) or (K224Q) or (K224W) or (K224Y) or (L150A) or (L150C) or (L150D) or (L150E) or (L150F) or (L150G) or (L150H) or (L150I) or (L150K) or (L150M) or (L150N) or (L150Q) or (L150R) or (L150R, F205R) or (L150S) or (L150S, F173L) or (L150T) or (L150V) or (L150W) or (L150Y) or (L181H) or (L181I) or (L181M) or (L181P) or (L181V) or (L181Y) or (L181Y, A184D) or (L181Y, L188F) or (L181Y, L188K) or (L181Y, L188K, H659R) or (L188A) or (L188D) or (L188E) or (L188F) or (L188H) or (L188I) or (L188K) or (L188M) or (L188N) or (L188Q) or (L188R) or (L188S) or (L188W) or (L20C) or (L20D) or (L20E) or (L20F) or (L20G) or (L20G, R47L) or (L20I) or (L20M) or (L20N) or (L20P) or (L20R) or (L20S) or (L20T) or (L20V) or (L20W) or (L20Y) or (L262I) or (L262V) or (L262W) or (L262Y) or (L272A) or (L272C) or (L272E) or (L272F) or (L272G) or (L272I) or (L272K) or (L272M) or (L272N) or (L272Q) or (L272R) or (L272S) or (L272T) or (L272V) or (L272W) or (L272Y) or (L29A) or (L29C) or (L29D) or (L29F) or (L29H) or (L29I) or (L29M) or (L29M, R47G) or (L29P) or (L29Q) or (L29S) or (L29T) or (L29V) or (L29W) or (L29Y) or (L324F) or (L356C) or (L356F) or (L356H) or (L356I) or (L356M) or (L356N) or (L356Q) or (L356S) or (L356T) or (L356V) or (L356W) or (L437I) or (L437M) or (L75H, F81S) or (L75I) or (L75I, F81C) or (L75I, F81G) or (L75I, F81H) or (L75I, F81I) or (L75I, F81L) or (L75I, F81S) or (L75I, F81V) or (L75I, F81Y) or (L75V) or (L75V, F81C) or (L75V, F81H) or (L75V, F81I) or (L75V, F81L) or (L75V, F81V) or (L75V, F81Y) or (L78F) or (L78I) or (L78M) or (L78V) or (L78Y) or (L86A, S89T) or (L86I) or (L86I, S89T) or (L86M) or (L86M, S89T) or (L86N, S89T) or (L86V) or (L86V, S89T) or (M118A) or (M118E) or (M118F) or (M118G) or (M118H) or (M118I) or (M118K) or (M118L) or (M118N) or (M118P) or (M118Q) or (M118S) or (M118T) or (M118V) or (M118W) or (M118Y) or (M177A) or (M177C) or (M177C, V178Y) or (M177D) or (M177E) or (M177F) or (M177G) or (M177H) or (M177I) or (M177K) or (M177L) or (M177N) or (M177P) or (M177Q) or (M177R) or (M177T) or (M177V) or (M177Y) or (M177Y, A184W) or (M177Y, A184Y) or (M177Y, M 185V) or (M177Y, R50S) or (M177Y, V178P) or (M177Y, V178P, A184Y, L188F) or (M177Y, V178W) or (M177Y, V178W, A184Y) or (M177Y, V178W, A184Y, L188F) or (M185C) or (M185D) or (M185E) or (M185G) or (M185H) or (M185K) or (M185L) or (M185N) or (M185Q) or (M185R) or (M185V) or (M185Y) or (M212A) or (M212C) or (M212C, I259L) or (M212D) or (M212E) or (M212F) or (M212G) or (M212H) or (M212K) or (M212L) or (M212L, I259F) or (M212P) or (M212Q) or (M212R) or (M212S) or (M212T) or (M212V) or (M212W) or (M212Y) or (M354A) or (M354C) or (M354D) or (M354E) or (M354G) or (M354I) or (M354K) or (M354K, D363Y) or (M354L) or (M354N) or (M354Q) or (M354R) or (M354S) or (M354T) or (M354V) or (M354W) or (M354Y) or (N70A) or (N70C) or (N70F) or (N70G) or (N70H) or (N70K) or (N70R) or (N70W) or (N70Y) or (P243T, H266L) or (P326C) or (P326D) or (P326G) or (P326N) or (P326S) or (P326T) or (P329A) or (P329C) or (P329G) or (P329K) or (P329S) or (P329T) or (P392C) or (P392G) or (P392Q) or (P392R) or (P392V) or (P9S) or (R147C, H266G) or (R161C, G271D) or (R190L, F261V) or (R203C) or (R255A) or (R255F) or (R255G) or (R255I) or (R255K) or (R255L) or (R255M) or (R255N) or (R255P) or (R255T) or (R255W) or (R323C) or (R47A) or (R47C) or (R47D) or (R47E) or (R47F) or (R47G) or (R47H) or (R47H, A74W) or (R47I) or (R47K) or (R47L) or (R47M) or (R47N) or (R47P) or (R47Q) or (R47S) or (R47T) or (R47V) or (R47W) or (R50A) or (R50C) or (R50D) or (R50E) or (R50F) or (R50G) or (R50I) or (R50L) or (R50M) or (R50N) or (R50P) or (R50Q) or (R50S) or (R50S, A184W, L188F) or (R50S, A74I, A184W, L188F) or (R50S, A74M, A184Y, L188K) or (R50S, A74T, L181Y, A184D, L188K, G240R) or (R50S, A74V) or (R50S, M177Y, V178P, A184Y) or (R50S, M177Y, V178W, A184W) or (R50S, M177Y, V178W, A184Y) or (R50S, M177Y, V178W, A184Y, A330R) or (R50S, M177Y, V178W, A184Y, A74V, G677D) or (R50S, M177Y, V178W, A184Y, H266S) or (R50S, M177Y, V178W, A184Y, L181P) or (R50S, M177Y, V178W, A184Y, L181Y) or (R50S, M177Y, V178W, A184Y, L188K) or (R50S, M177Y, V178W, A184Y, L188R) or (R50S, M177Y, V178W, A184Y, T146F) or (R50S, M177Y, V178W, A184Y, V26N) or (R50S, M177Y, V178W, L181Y, A184Y) or (R50S, S72G, A74V) or (R50S, S72G, A74V, M177Y, A184Y) or (R50S, S72G, A74V, M177Y, V178P, A184Y) or (R50S, S72G, A74V, M177Y, V178W, A184Y) or (R50S, S72G, A74V, M177Y, V178W, A184Y, L188R) or (R50S, T146F, M177Y, V178W, A184Y) or (R50V) or (R50Y) or (S164N, F261L) or (S176A, A184Y, L188K) or (S176C) or (S176D) or (S176E) or (S176F) or (S176G) or (S176H) or (S176K) or (S176L) or (S176M) or (S176N) or (S176P) or (S176Q) or (S176R) or (S72C, A74C) or (S72C, A74I) or (S72C, A74L) or (S72C, A74V) or (S72C, A74Y) or (S72D, A74C) or (S72D, A74F) or (S72G) or (S72G, A74C) or (S72G, A74F) or (S72G, A74H) or (S72G, A74I) or (S72G, A74I, A184W, L188F) or (S72G, A74I, F77A, M177Y) or (S72G, A74I, F77L) or (S72G, A74I, F77L, M177Y) or (S72G, A74I, L181Y) or (S72G, A74I, L181Y, L188F) or (S72G, A74I, L181Y, L188K) or (S72G, A74I, L181Y, L188R) or (S72G, A74I, L188F) or (S72G, A74I, L188K) or (S72G, A74I, L188R) or (S72G, A74I, T146F) or (S72G, A74I, T146F, L181Y) or (S72G, A74I, T146F, L181Y, L188F) or (S72G, A74I, T146F, L181Y, L188K) or (S72G, A74I, T146F, L181Y, L188R) or (S72G, A74I, T146F, L188F) or (S72G, A74I, T146F, L188K) or (S72G, A74I, T146F, L188R) or (S72G, A74I, T146F, V178P) or (S72G, A74I, T146F, V178P, L181Y) or (S72G, A74I, T146F, V178P, L181Y, L188F) or (S72G, A74I, T146F, V178P, L181Y, L188K) or (S72G, A74I, T146F, V178P, L181Y, L188R) or (S72G, A74I, T146F, V178P, L188F) or (S72G, A74I, T146F, V178P, L188K) or (S72G, A74I, T146F, V178P, L188R) or (S72G, A74I, T146F, V178W) or (S72G, A74I, T146F, V178W, L181Y) or (S72G, A74I, T146F, V178W, L181Y, L188F) or (S72G, A74I, T146F, V178W, L181Y, L188K) or (S72G, A74I, T146F, V178W, L181Y, L188R) or (S72G, A74I, T146F, V178W, L188F) or (S72G, A74I, T146F, V178W, L188K) or (S72G, A74I, T146F, V178W, L188R) or (S72G, A74I, V178P) or (S72G, A74I, V178P, L181Y) or (S72G, A74I, V178P, L181Y, L188K) or (S72G, A74I, V178P, L181Y, L188R) or (S72G, A74I, V178P, L188F) or (S72G, A74I, V178P, L188K) or (S72G, A74I, V178P, L188R) or (S72G, A74I, V178W) or (S72G, A74I, V178W, L181Y, L188F) or (S72G, A74I, V178W, L181Y, L188K) or (S72G, A74I, V178W, L181Y, L188R) or (S72G, A74I, V178W, L188F) or (S72G, A74I, V178W, L188K) or (S72G, A74I, V178W, L188R) or (S72G, A74L) or (S72G, A74M, A184Y, L188K) or (S72G, A74S) or (S72G, A74T) or (S72G, A74T, L181Y, A184D, L188K) or (S72G, A74T, L181Y, L188F) or (S72G, A74T, L181Y, L188K) or (S72G, A74T, L181Y, L188R) or (S72G, A74T, L188F) or (S72G, A74T, L188K) or (S72G, A74T, L188R) or (S72G, A74T, T146F) or (S72G, A74T, T146F, L181Y) or (S72G, A74T, T146F, L181Y, L188K) or (S72G, A74T, T146F, L181Y, L188R) or (S72G, A74T, T146F, L188F) or (S72G, A74T, T146F, L188K) or (S72G, A74T, T146F, L188R) or (S72G, A74T, T146F, V178P) or (S72G, A74T, T146F, V178P, L181Y) or (S72G, A74T, T146F, V178P, L188F) or (S72G, A74T, T146F, V178P, L188K) or (S72G, A74T, T146F, V178P, L188R) or (S72G, A74T, T146F, V178W) or (S72G, A74T, T146F, V178W, L181Y) or (S72G, A74T, T146F, V178W, L181Y, L188F) or (S72G, A74T, T146F, V178W, L181Y, L188K) or (S72G, A74T, T146F, V178W, L181Y, L188R) or (S72G, A74T, T146F, V178W, L188F) or (S72G, A74T, T146F, V178W, L188K) or (S72G, A74T, T146F, V178W, L188R) or (S72G, A74T, V178P) or (S72G, A74T, V178P, L181Y) or (S72G, A74T, V178P, L181Y, L188F) or (S72G, A74T, V178P, L181Y, L188K) or (S72G, A74T, V178P, L188F) or (S72G, A74T, V178P, L188K) or (S72G, A74T, V178P, L188R) or (S72G, A74T, V178W) or (S72G, A74T, V178W, L181Y, L188F) or (S72G, A74T, V178W, L181Y, L188K) or (S72G, A74T, V178W, L188F) or (S72G, A74T, V178W, L188K) or (S72G, A74T, V178W, L188R) or (S72G, A74V) or (S72G, A74V, A184W) or (S72G, A74V, A221V) or (S72G, A74V, F77A) or (S72G, A74V, F77A, M177Y) or (S72G, A74V, F77L, M177Y) or (S72G, A74V, F77S) or (S72G, A74V, L181Y) or (S72G, A74V, L181Y, L188F) or (S72G, A74V, L181Y, L188K) or (S72G, A74V, L188F) or (S72G, A74V, L188K) or (S72G, A74V, L188R) or (S72G, A74V, T146F) or (S72G, A74V, T146F, L181Y) or (S72G, A74V, T146F, L181Y, L188F) or (S72G, A74V, T146F, L181Y, L188K) or (S72G, A74V, T146F, L181Y, L188R) or (S72G, A74V, T146F, L188F) or (S72G, A74V, T146F, L188K) or (S72G, A74V, T146F, L188R) or (S72G, A74V, T146F, V178P) or (S72G, A74V, T146F, V178P, L181Y) or (S72G, A74V, T146F, V178P, L181Y, L188F) or (S72G, A74V, T146F, V178P, L181Y, L188K) or (S72G, A74V, T146F, V178P, L181Y, L188R) or (S72G, A74V, T146F, V178P, L188F) or (S72G, A74V, T146F, V178P, L188K) or (S72G, A74V, T146F, V178P, L188R) or (S72G, A74V, T146F, V178W) or (S72G, A74V, T146F, V178W, L181Y) or (S72G, A74V, T146F, V178W, L181Y, L188K) or (S72G, A74V, T146F, V178W, L181Y, L188R) or (S72G, A74V, T146F, V178W, L188F) or (S72G, A74V, T146F, V178W, L188K) or (S72G, A74V, T146F, V178W, L188R) or (S72G, A74V, V178P) or (S72G, A74V, V178P, L181Y) or (S72G, A74V, V178P, L181Y, L188F) or (S72G, A74V, V178P, L181Y, L188K) or (S72G, A74V, V178P, L181Y, L188R) or (S72G, A74V, V178P, L188F) or (S72G, A74V, V178P, L188K) or (S72G, A74V, V178P, L188R) or (S72G, A74V, V178W) or (S72G, A74V, V178W, L181Y) or (S72G, A74V, V178W, L181Y, L188F) or (S72G, A74V, V178W, L181Y, L188K) or (S72G, A74V, V178W, L181Y, L188R) or (S72G, A74V, V178W, L188F) or (S72G, A74V, V178W, L188K) or (S72G, A74V, V178W, L188R) or (S72G, A74Y) or (S72G, L181Y) or (S72G, L181Y, L188F) or (S72G, L181Y, L188K) or (S72G, L181Y, L188R) or (S72G, L188F) or (S72G, L188K) or (S72G, L188R) or (S72G, M177Y, V178W) or (S72G, M177Y, V178W, L188K) or (S72G, T146F) or (S72G, T146F, L181Y) or (S72G, T146F, L181Y, L188F) or (S72G, T146F, L181Y, L188K) or (S72G, T146F, L181Y, L188R) or (S72G, T146F, L188F) or (S72G, T146F, L188K) or (S72G, T146F, L188R) or (S72G, T146F, V178P) or (S72G, T146F, V178P, L181Y) or (S72G, T146F, V178P, L181Y, L188F) or (S72G, T146F, V178P, L181Y, L188K) or (S72G, T146F, V178P, L181Y, L188R) or (S72G, T146F, V178P, L188F) or (S72G, T146F, V178P, L188K) or (S72G, T146F, V178P, L188R) or (S72G, T146F, V178W) or (S72G, T146F, V178W, L181Y) or (S72G, T146F, V178W, L181Y, L188F) or (S72G, T146F, V178W, L181Y, L188K) or (S72G, T146F, V178W, L188F) or (S72G, T146F, V178W, L188K) or (S72G, T146F, V178W, L188R) or (S72G, V178P) or (S72G, V178P, L181Y) or (S72G, V178P, L181Y, L188F) or (S72G, V178P, L181Y, L188K) or (S72G, V178P, L181Y, L188R) or (S72G, V178P, L188F) or (S72G, V178P, L188K) or (S72G, V178P, L188R) or (S72G, V178W) or (S72G, V178W, L181Y) or (S72G, V178W, L181Y, L188F) or (S72G, V178W, L181Y, L188K) or (S72G, V178W, L181Y, L188R) or (S72G, V178W, L188F) or (S72G, V178W, L188K) or (S72G, V178W, L188R) or (S72H, A74C) or (S72H, A74G) or (S72H, A74S) or (S72H, A74Y) or (S72N, A74C) or (S72N, A74I) or (S72N, A74N) or (S72N, A74V) or (S72T) or (S72W) or (S72W, A74I, A184W, L188F) or (S72W, A74V) or (S72W, L333R) or (S72W, W90Y, V299G) or (S72Y, A74V) or (S89C) or (S89E) or (S89G) or (S89I) or (S89L) or (S89M) or (S89N) or (S89Q) or (S89R) or (S89T) or (S89V) or (T146A) or (T146A, D222Y, 1263M) or (T146A, F173D) or (T146A, F173V) or (T146A, F205G) or (T146A, F261C) or (T146A, F261S) or (T146A, F261V) or (T146A, G271R) or (T146A, G271S) or (T146A, G271T) or (T146A, H266T) or (T146A, H266V) or (T146A, I258T, I259S) or (T146A, I259H) or (T146A, I263F) or (T146A, I263L) or (T146A, I263N) or (T146A, I263V) or (T146A, L150A) or (T146A, L150G) or (T146A, L150K) or (T146A, L150R, F173I) or (T146A, L272H) or (T146A, L272R) or (T146A, L272S) or (T146A, L272W) or (T146A, M212A) or (T146C) or (T146D) or (T146E) or (T146F) or (T146F, L181Y) or (T146F, L181Y, L188F) or (T146F, L181Y, L188K) or (T146F, L188K) or (T146F, L188R) or (T146F, V178P) or (T146F, V178P, L181Y, L188R) or (T146F, V178P, L188K) or (T146F, V178P, L188R) or (T146F, V178W) or (T146F, V178W, L181Y, L188R) or (T146F, V178W, L188F) or (T146F, V178W, L188K) or (T146F, V178W, L188R) or (T146G) or (T146H) or (T146L) or (T146M) or (T146N) or (T146P) or (T146R) or (T146S) or (T146V) or (T146V, A191T) or (T146Y) or (T149P) or (T260A) or (T260S) or (T260W) or (T268A) or (T268S) or (T269K) or (T327A) or (T327A, A330W) or (T327C) or (T327D) or (T327E) or (T327G) or (T327I) or (T327L) or (T327M) or (T327N) or (T327P) or (T327Q) or (T327S) or (T327V) or (T365A) or (T365C) or (T365D) or (T365F) or (T365G) or (T365H) or (T365I) or (T365K) or (T365L) or (T365N) or (T365P) or (T365Q) or (T365V) or (T365W) or (T365Y) or (T436A) or (T436C) or (T436D) or (T436E) or (T436F) or (T436G) or (T436H) or (T436I) or (T436K) or (T436L) or (T436M) or (T436N) or (T436P) or (T436Q) or (T436R) or (T436S) or (T436V) or (T436W) or (T436Y) or (T438A) or (T438C) or (T438G) or (T438I) or (T438L) or (T438S) or (T438V) or (T49A) or (T49C) or (T49D) or (T49E) or (T49F) or (T49G) or (T49H) or (T49I) or (T49K) or (T49L) or (T49L, S54N) or (T49M) or (T49N) or (T49P) or (T49Q) or (T49R) or (T49R, R50C) or (T49R, R50S, M177Y, V178W, A184Y) or (T49S) or (T49V) or (T49W) or (T49Y) or (T88A) or (T88C) or (T88S) or (T88V) or (V178A) or (V178D) or (V178F) or (V178H) or (V178I) or (V178K) or (V178L) or (V178M) or (V178N) or (V178P) or (V178P, L181Y) or (V178P, L181Y, L188R) or (V178P, L188F) or (V178P, L188K) or (V178P, L188R) or (V178Q) or (V178R) or (V178S) or (V178T) or (V178W) or (V178W, A184Y) or (V178W, L181Y, L188K) or (V178W, L181Y, L188R) or (V178W, L188R) or (V178W, R50S) or (V178Y) or (V26A) or (V26C) or (V26E) or (V26F) or (V26G) or (V26G, R47S) or (V26H) or (V26I) or (V26K) or (V26L) or (V26M) or (V26N) or (V26N, R50S, M177Y, V178W, A184Y) or (V26Q) or (V26R) or (V26S) or (V26T) or (V26W) or (V26Y) or (V314A) or (V314E) or (V314F) or (V314H) or (V314P) or (V314Q) or (V314S) or (V314Y) or (V371 P) or (V48A) or (V48D) or (V48E) or (V48F) or (V48G) or (V48H) or (V48I) or (V48L) or (V48M) or (V48P) or (V48Q) or (V48R) or (V48S) or (V48T) or (V48W) or (V48Y) or (W325A) or (W325C) or (W325D) or (W325E) or (W325F) or (W325G) or (W325I) or (W325K) or (W325L) or (W325M) or (W325Q) or (W325R) or (W325S) or (W325T) or (W325V) or (W325Y) or (W90D) or (W90Y) or (W90Y, V299G, G570D) or (Y51A) or (Y51C) or (Y51 E) or (Y51F) or (Y51G) or (Y51H) or (Y51I) or (Y51 L) or (Y51M) or (Y51N) or (Y51P) or (Y51Q) or (Y51S) or (Y51S, F77V) or (Y51T) or (Y51V) or (Y51W) or (A225C) or (A225G) or (A225M) or (A225N) or (A225Q) or (A225S) or (A225T) or (A225V) or (A225Y) or (A44G) or (A44Q) or (A44T) or (D182A) or (D182C) or (D182E) or (D182H) or (D182I) or (D182M) or (D182N) or (D182V) or (D182W) or (D80C) or (D80L) or (D80M) or (D80N) or (D80S) or (D80T) or (D80W) or (E140A) or (E140D) or (E140K) or (E140L) or (E140M) or (E140T) or (E183D) or (E183T) or (E337L) or (E337V) or (E409N) or (G114C) or (G114K) or (G114L) or (G114N) or (G114W) or (G227N) or (G227R) or (G240A) or (G240C) or (G240H) or (G240K) or (G240M) or (G240N) or (G240Q) or (G240R) or (G240S) or (G240V) or (G46T) or (H236A) or (H236C) or (H236D) or (H236F) or (H236G) or (H236I) or (H236K) or (H236M) or (H236P) or (H236R) or (H236S) or (H236Y) or (H92F) or (H92Y) or (I174T) or (I174V) or (I258C) or (I258L) or (I258M) or (I258V) or (K187A) or (K187G) or (K187N) or (K187R) or (K440C) or (K440M) or (K440N) or (K440T) or (K76C) or (K76E) or (K76F) or (K76H) or (K76I) or (K76L) or (K76N) or (K76V) or (M5C) or (M5E) or (M5P) or (M5Q) or (N186A) or (N186D) or (N186E) or (N186F) or (N186H) or (N186K) or (N186L) or (N186M) or (N186Q) or (N186T) or (N186V) or (N186Y) or (P172A) or (P172D) or (P172G) or (Q189E) or (Q189I) or (Q189K) or (Q189N) or (Q189V) or (Q397R) or (Q403K) or (Q403R) or (Q404F) or (Q404Y) or (Q73A) or (Q73E) or (Q73F) or (Q73L) or (Q73S) or (Q73T) or (Q73W) or (Q73Y) or (R179A) or (R179H) or (R179L) or (R179M) or (R179P) or (R179V) or (R190C) or (R190G) or (R190K) or (R190M) or (R190N) or (R190S) or (R190V) or (R190W) or (R79E) or (R79K) or (S270A) or (S270D) or (S270G) or (S53C) or (T175F) or (T175G) or (T175H) or (T175L) or (T175M) or (T175N) or (T175Q) or (T175R) or (T175Y) or (T269A) or (T269V) or (V299L) or (V299W) or (A225V, H236K, G240V, T269V) or (D80I, D182H, A225V, G240V, T269V) or(F173W, R179L, R190V, A225V) or (F173W, R179L, R190V, K440C) or (F173W, R179L, T269V, K440C) or (F173W, R190V, H236K, T269V) or (H236K, G240V, T269V, K440C) or (K76I, F173W, R179L, D182I, R190V, K440C) or (Q73W, D80I, N186V, G240V) or (R179L, A225S) or (R179L, A225V, G240V, K440C) or (R179L, R190V) or (R190V, A225V, T269V, K440C) or (T175M, H236D) or (T175M, R190V).

[0214] The variants according to the sixth embodiment were surprisingly found to show an improved product yield or titer or selectivity of the C19 hydroxylation, thereby further improving efficiency of the C19 hydroxylation process in comparison with the parent variant.

[0215] There is provided a first preferred subset comprising variants according to the sixth embodiment, wherein the P450-BM3 variants have an improved product yield or product titer for C19 hydroxylation in comparison with the parent variant. Comprised within this subset are variants comprising at least the mutation(s) (A184D) or (A184D, L188K) or (A184E) or (A184F) or (A184G) or (A184H) or (A184I) or (A184K) or (A184L) or (A184N) or (A184Q) or (A184R) or (A184W) or (A184W, L188F) or (A184Y) or (A184Y, L188K) or (A184Y, R50S) or (A221S) or (A264V) or (A321C) or (A321D) or (A321E) or (A321G) or (A321I) or (A321N) or (A321T) or (A321V) or (A330C) or (A330D) or (A330E) or (A330F) or (A330G) or (A330H) or (A330I) or (A330K) or (A330L) or (A330M) or (A330N) or (A330Q) or (A330R) or (A330S) or (A330T) or (A330T, E352A) or (A330V) or (A330W) or (A330Y) or (A330Y, W367C) or (A33V) or (A399C) or (A399E) or (A399G) or (A399I) or (A399L) or (A399M) or (A399N) or (A399Q) or (A399R) or (A399S) or (A399T) or (A399V) or (A74C) or (A74C, L75V) or (A74D) or (A74D, F81V) or (A74E) or(A74F) or(A74H) or(A74I) or(A74I, A184W, L188F) or (A74I, F77A, L181Y, A184W) or(A74I, L181Y, L188R) or (A74I, L188F) or (A74I, L188K) or (A74I, L188R) or (A74I, M177Y, A184R, L188F) or (A74I, M177Y, V178P, A184G) or (A74I, T146F) or (A74I, T146F, L181Y) or (A74I, T146F, L181Y, L188K) or (A74I, T146F, L181Y, L188R) or (A74I, T146F, L188F) or (A74I, T146F, L188K) or (A74I, T146F, V178P) or (A74I, T146F, V178P, L181Y, L188F) or (A74I, T146F, V178P, L181Y, L188K) or (A74I, T146F, V178P, L188K) or (A74I, T146F, V178P, L188R) or (A74I, T146F, V178W) or (A74I, T146F, V178W, L181Y, L188F) or (A74I, T146F, V178W, L181Y, L188R) or (A74I, T146F, V178W, L188F) or (A74I, T146F, V178W, L188K) or (A74I, T146F, V178W, L188R) or (A74I, V178P) or (A74I, V178P, L181Y) or (A74I, V178P, L181Y, L188R) or (A74I, V178P, L188F) or (A74I, V178P, L188K) or (A74I, V178P, L188R) or (A74I, V178W, L188F) or (A74I, V178W, L188R) or (A74K) or (A74L) or (A74M) or (A74N) or (A74P) or (A74Q) or (A74R) or (A74R, L75V) or (A74S) or (A74T) or (A74T, A184D) or (A74T, F77A, L181Y, A184D, L188K) or (A74T, F77A, V178W, A184Y) or (A74T, F77L, L181Y, A184D, L188K) or (A74T, L181Y) or (A74T, L181Y, A184D, L188K) or (A74T, L181Y, A184Y, L188K) or (A74T, L181Y, L188K) or (A74T, L181Y, L188R) or (A74T, L188K) or (A74T, M177Y, L181Y, A184D, L188K) or (A74T, T146F, L181Y, A184D, L188K) or (A74T, T146F, L181Y, L188K) or (A74T, T146F, L181Y, L188R) or (A74T, T146F, L188F) or (A74T, T146F, L188K) or (A74T, T146F, L188R) or (A74T, T146F, V178P) or (A74T, T146F, V178P, L181Y) or (A74T, T146F, V178P, L188K) or (A74T, T146F, V178P, L188R) or (A74T, T146F, V178W) or (A74T, T146F, V178W, L181Y) or (A74T, T146F, V178W, L181Y, L188K) or (A74T, T146F, V178W, L188R) or (A74T, V178P) or (A74T, V178P, L188F) or (A74T, V178P, L188K) or (A74T, V178P, L188R) or (A74T, V178W, L181Y, L188K) or (A74T, V178W, L188K) or (A74T, V178W, L188R) or (A74V) or (A74V, F77A, A184N, L188F) or (A74V, L181Y) or (A74V, L181Y, A184D, L188K) or (A74V, L181Y, A184W, L188F) or (A74V, L181Y, L188F) or (A74V, L188F) or (A74V, L188K) or (A74V, L75V) or (A74V, T146F, L181Y, L188K) or (A74V, T146F, L181Y, L188R) or (A74V, T146F, L188K) or (A74V, T146F, L188R) or (A74V, T146F, V178W, L181Y, L188F) or (A74V, V178P, A184W, L188K) or (A74V, V178P, L181Y, L188F) or (A74V, V178P, L181Y, L188K) or (A74V, V178P, L181Y, L188R) or (A74V, V178P, L188F) or (A74V, V178W, L188K) or (A74W) or (A74Y) or (D363G, T438C) or (E13D, R47L) or (E143A) or (E143C) or (E143D) or (E143F) or (E143G) or (E143I) or (E143K) or (E143L) or (E143M) or (E143N) or (E143P) or (E143Q) or (E143R) or (E143S) or (E143V) or (E143W) or (E143Y) or (E267D) or (E267R) or (E267T) or (E352A) or (E352D) or (E352F) or (E352G) or (E352I) or (E352L) or (E352M) or (E352N) or (E352P) or (E352R) or (E352S) or (E352T) or (E352V) or (E352W) or (E352Y) or (E64A) or (E64G) or (E64H) or (E64K) or (E64L) or (E64M) or (E64N) or (E64Q) or (E64V) or (E64Y) or (E82P) or (E93G) or (F173C) or (F173C, F205G) or (F173D) or (F173I) or (F173K) or (F173L) or (F173M) or (F173N) or (F173P) or (F173Q) or (F173R) or (F173S) or (F173S, F205P) or (F173V) or (F173W) or (F173Y) or (F173Y, I174F) or (F205A) or (F205C) or (F205D) or (F205D, D208N) or (F205E) or (F205G) or (F205H) or (F205I) or (F205K) or (F205L) or (F205M) or (F205N) or (F205P) or (F205R) or (F205S) or (F205T) or (F205V) or (F205W) or (F205Y) or (F261A) or (F261C) or (F261D) or (F261G) or (F261I) or (F261L) or (F261M) or (F261Q) or (F261S) or (F261T) or (F261V) or (F261Y) or (F331H) or (F331I) or (F331L) or (F331M) or (F331V) or (F331W) or (F331Y) or (F393M) or (F393W) or (F77A) or (F77A, A184W) or (F77A, L181P, A184Y, L188K) or (F77A, M 177Y) or (F77C) or (F77D) or (F77E) or (F77G) or (F77H) or (F77I) or (F77K) or (F77L) or (F77M) or (F77N) or (F77P) or (F77R) or (F77S) or (F77T) or (F77V) or (F77V, L86M) or (F77W) or (F77Y) or (F81D) or (F81I) or (F81L) or (F81R) or (F81S) or (F81V) or (F81W) or (F81Y) or (G271A) or (G271C) or (G271D) or (G271E) or (G271F) or (G271H) or (G271K) or (G271L) or (G271M) or (G271N) or (G271P) or (G271Q) or (G271S) or (G271T) or (G271V) or (G271W) or (G271Y) or (G402A) or (G415A) or (G415D) or (G415S) or (G415T) or (G415V) or (G85A) or (G85L) or (G85S) or (H266A) or (H266C) or (H266E) or (H266F) or (H266I) or (H266K) or (H266M) or (H266N) or (H266Q) or (H266S) or (H266V) or (H266W) or (H266Y) or (I153F, G271L) or (I153L) or (I153L, F173Y) or (I259A) or (I259C) or (I259D) or (I259F) or (I259H) or (I259K) or (I259L) or (I259M) or (I259N) or (I259Q) or (I259S) or (I259T) or (I259V) or (I263A) or (I263C) or (I263E) or (I263F) or (I263H, A264G) or (I263K) or (I263L) or (I263M) or (I263N) or (I263Q) or (I263S) or (I263V) or (I263Y) or (I401A) or (I401M) or (I401T) or (I401V) or (K210E) or (K210T, G271V) or (K224C) or (K224E) or (K224H) or (K224I) or (K224L) or (K224M) or (K224P) or (K224Q) or (K224W) or (K224Y) or (L150A) or (L150C) or (L150D) or (L150E) or (L150F) or (L150G) or (L150H) or (L150I) or (L150K) or (L150M) or (L150N) or (L150Q) or (L150R) or (L150R, F205R) or (L150S) or (L150S, F173L) or (L150T) or (L150V) or (L150W) or (L150Y) or (L181H) or (L181I) or (L181M) or (L181P) or (L181V) or (L181Y) or (L181Y, A184D) or (L181Y, L188F) or (L181Y, L188K) or (L181Y, L188K, H659R) or (L188A) or (L188D) or (L188E) or (L188F) or (L188H) or (L188I) or (L188K) or (L188M) or (L188N) or (L188Q) or (L188R) or (L188S) or (L188W) or (L20C) or (L20D) or (L20E) or (L20F) or (L20G) or (L20G, R47L) or (L20I) or (L20M) or (L20N) or (L20P) or (L20R) or (L20S) or (L20T) or (L20V) or (L20W) or (L20Y) or (L262I) or (L262V) or (L262W) or (L272A) or (L272C) or (L272E) or (L272F) or (L272G) or (L272I) or (L272K) or (L272M) or (L272N) or (L272Q) or (L272S) or (L272T) or (L272V) or (L272W) or (L272Y) or (L29A) or (L29C) or (L29D) or (L29F) or (L29H) or (L29I) or (L29M) or (L29M, R47G) or (L29Q) or (L29S) or (L29T) or (L29V) or (L29W) or (L29Y) or (L324F) or (L356C) or (L356F) or (L356I) or (L356M) or (L356V) or (L437I) or (L437M) or (L75I) or (L75I, F81C) or (L75I, F81I) or (L75I, F81L) or (L75I, F81S) or (L75I, F81V) or (L75V) or (L75V, F81C) or (L75V, F81L) or (L75V, F81V) or (L75V, F81Y) or (L78F) or (L78I) or (L78M) or (L78V) or (L86I) or (L86I, S89T) or (L86M) or (L86M, S89T) or (L86V) or (M118A) or (M118E) or (M118F) or (M118G) or (M118H) or (M118I) or (M118K) or (M118L) or (M118N) or (M118P) or (M118Q) or (M118S) or (M118T) or (M118V) or (M118W) or (M118Y) or (M177A) or (M177C) or (M177C, V178Y) or (M177D) or (M177E) or (M177F) or (M177G) or (M177H) or (M177I) or (M177L) or (M177N) or (M177P) or (M177Q) or (M177R) or (M177T) or (M177V) or (M177Y) or (M177Y, A184W) or (M177Y, A184Y) or (M177Y, M185V) or (M177Y, R50S) or (M177Y, V178P) or (M177Y, V178P, A184Y, L188F) or (M177Y, V178W) or (M177Y, V178W, A184Y) or (M177Y, V178W, A184Y, L188F) or (M185C) or (M185D) or (M185E) or (M185G) or (M185H) or (M185K) or (M185L) or (M185N) or (M185Q) or (M185V) or (M212A) or (M212C) or (M212D) or (M212E) or (M212F) or (M212G) or (M212H) or (M212K) or (M212L) or (M212L, I259F) or (M212Q) or (M212R) or (M212S) or (M212T) or (M212V) or (M212W) or (M212Y) or (M354A) or (M354C) or (M354D) or (M354E) or (M354G) or (M354I) or (M354K) or (M354K, D363Y) or (M354L) or (M354N) or (M354Q) or (M354R) or (M354S) or (M354T) or (M354V) or (M354W) or (M354Y) or (N70A) or (N70C) or (N70F) or (N70G) or (N70H) or (N70K) or (N70R) or (N70Y) or (P243T, H266L) or (P329A) or (P392C) or (P392G) or (P392Q) or (P392R) or (P392V) or (P9S) or (R147C, H266G) or (R161C, G271D) or (R190L, F261V) or (R203C) or (R255A) or (R255G) or (R255I) or (R255K) or (R255L) or (R255M) or (R255N) or (R255P) or (R255T) or (R255W) or (R47A) or (R47C) or (R47D) or (R47E) or (R47F) or (R47G) or (R47H) or (R47H, A74W) or (R47I) or (R47K) or (R47L) or (R47M) or (R47N) or (R47P) or (R47Q) or (R47S) or (R47T) or (R47V) or (R47W) or (R50A) or (R50C) or (R50D) or (R50E) or (R50F) or (R50G) or (R50I) or (R50L) or (R50M) or (R50N) or (R50P) or (R50Q) or (R50S) or (R50S, A184W, L188F) or (R50S, A74I, A184W, L188F) or (R50S, A74M, A184Y, L188K) or (R50S, A74T, L181Y, A184D, L188K, G240R) or (R50S, A74V) or (R50S, M177Y, V178P, A184Y) or (R50S, M177Y, V178W, A184W) or (R50S, M177Y, V178W, A184Y) or (R50S, M177Y, V178W, A184Y, A330R) or (R50S, M177Y, V178W, A184Y, A74V, G677D) or (R50S, M177Y, V178W, A184Y, L181P) or (R50S, M177Y, V178W, A184Y, L181Y) or (R50S, M177Y, V178W, A184Y, L188K) or (R50S, M177Y, V178W, A184Y, L188R) or (R50S, M177Y, V178W, A184Y, T146F) or (R50S, M177Y, V178W, A184Y, V26N) or (R50S, M177Y, V178W, L181Y, A184Y) or (R50S, S72G, A74V) or (R50S, S72G, A74V, M177Y, A184Y) or (R50S, S72G, A74V, M177Y, V178P, A184Y) or (R50S, S72G, A74V, M177Y, V178W, A184Y) or (R50S, S72G, A74V, M177Y, V178W, A184Y, L188R) or (R50S, T146F, M177Y, V178W, A184Y) or (R50V) or (R50Y) or (S176A, A184Y, L188K) or (S176C) or (S176D) or (S176E) or (S176F) or (S176G) or (S176H) or (S176K) or (S176L) or (S176M) or (S176N) or (S176P) or (S176Q) or (S72C, A74C) or (S72C, A74I) or (S72C, A74L) or (S72C, A74V) or (S72D, A74C) or (S72G) or (S72G, A74C) or (S72G, A74F) or (S72G, A74H) or (S72G, A74I) or (S72G, A74I, A184W, L188F) or (S72G, A74I, F77A, M177Y) or (S72G, A74I, F77L) or (S72G, A74I, F77L, M177Y) or (S72G, A74I, L181Y) or (S72G, A74I, L181Y, L188F) or (S72G, A74I, L181Y, L188K) or (S72G, A74I, L181Y, L188R) or (S72G, A74I, L188F) or (S72G, A74I, L188K) or (S72G, A74I, L188R) or (S72G, A74I, T146F) or (S72G, A74I, T146F, L181Y) or (S72G, A74I, T146F, L181Y, L188F) or (S72G, A74I, T146F, L181Y, L188K) or (S72G, A74I, T146F, L181Y, L188R) or (S72G, A74I, T146F, L188F) or (S72G, A74I, T146F, L188K) or (S72G, A74I, T146F, V178P) or (S72G, A74I, T146F, V178P, L181Y) or (S72G, A74I, T146F, V178P, L181Y, L188F) or (S72G, A74I, T146F, V178P, L181Y, L188K) or (S72G, A74I, T146F, V178P, L181Y, L188R) or (S72G, A74I, T146F, V178P, L188F) or (S72G, A74I, T146F, V178P, L188K) or (S72G, A74I, T146F, V178P, L188R) or (S72G, A74I, T146F, V178W) or (S72G, A74I, T146F, V178W, L181Y) or (S72G, A74I, T146F, V178W, L181Y, L188F) or (S72G, A74I, T146F, V178W, L181Y, L188K) or (S72G, A74I, T146F, V178W, L181Y, L188R) or (S72G, A74I, T146F, V178W, L188F) or (S72G, A74I, T146F, V178W, L188K) or (S72G, A74I, T146F, V178W, L188R) or (S72G, A74I, V178P) or (S72G, A74I, V178P, L181Y) or (S72G, A74I, V178P, L181Y, L188R) or (S72G, A74I, V178P, L188F) or (S72G, A74I, V178P, L188K) or (S72G, A74I, V178P, L188R) or (S72G, A74I, V178W) or (S72G, A74I, V178W, L181Y, L188F) or (S72G, A74I, V178W, L181Y, L188K) or (S72G, A74I, V178W, L181Y, L188R) or (S72G, A74I, V178W, L188F) or (S72G, A74I, V178W, L188R) or (S72G, A74L) or (S72G, A74M, A184Y, L188K) or (S72G, A74S) or (S72G, A74T) or (S72G, A74T, L181Y, A184D, L188K) or (S72G, A74T, L181Y, L188F) or (S72G, A74T, L181Y, L188K) or (S72G, A74T, L181Y, L188R) or (S72G, A74T, L188F) or (S72G, A74T, L188K) or (S72G, A74T, L188R) or (S72G, A74T, T146F) or (S72G, A74T, T146F, L181Y) or (S72G, A74T, T146F, L181Y, L188K) or (S72G, A74T, T146F, L181Y, L188R) or (S72G, A74T, T146F, L188F) or (S72G, A74T, T146F, L188K) or (S72G, A74T, T146F, L188R) or (S72G, A74T, T146F, V178P) or (S72G, A74T, T146F, V178P, L181Y) or (S72G, A74T, T146F, V178P, L188F) or (S72G, A74T, T146F, V178P, L188K) or (S72G, A74T, T146F, V178P, L188R) or (S72G, A74T, T146F, V178W) or (S72G, A74T, T146F, V178W, L181Y) or (S72G, A74T, T146F, V178W, L181Y, L188F) or (S72G, A74T, T146F, V178W, L181Y, L188K) or (S72G, A74T, T146F, V178W, L181Y, L188R) or (S72G, A74T, T146F, V178W, L188F) or (S72G, A74T, T146F, V178W, L188K) or (S72G, A74T, T146F, V178W, L188R) or (S72G, A74T, V178P) or (S72G, A74T, V178P, L181Y) or (S72G, A74T, V178P, L181Y, L188F) or (S72G, A74T, V178P, L181Y, L188K) or (S72G, A74T, V178P, L188F) or (S72G, A74T, V178P, L188K) or (S72G, A74T, V178P, L188R) or (S72G, A74T, V178W) or (S72G, A74T, V178W, L181Y, L188F) or (S72G, A74T, V178W, L181Y, L188K) or (S72G, A74T, V178W, L188F) or (S72G, A74T, V178W, L188K) or (S72G, A74T, V178W, L188R) or (S72G, A74V) or (S72G, A74V, A184W) or (S72G, A74V, A221V) or (S72G, A74V, F77A) or (S72G, A74V, F77A, M177Y) or (S72G, A74V, F77L, M177Y) or (S72G, A74V, F77S) or(S72G, A74V, L181Y) or (S72G, A74V, L181Y, L188F) or(S72G, A74V, L181Y, L188K) or (S72G, A74V, L188F) or (S72G, A74V, L188K) or (S72G, A74V, L188R) or (S72G, A74V, T146F) or (S72G, A74V, T146F, L181Y) or (S72G, A74V, T146F, L181Y, L188F) or (S72G, A74V, T146F, L181Y, L188K) or (S72G, A74V, T146F, L181Y, L188R) or (S72G, A74V, T146F, L188F) or (S72G, A74V, T146F, L188K) or (S72G, A74V, T146F, L188R) or (S72G, A74V, T146F, V178P) or (S72G, A74V, T146F, V178P, L181Y) or (S72G, A74V, T146F, V178P, L181Y, L188F) or (S72G, A74V, T146F, V178P, L181Y, L188K) or (S72G, A74V, T146F, V178P, L181Y, L188R) or (S72G, A74V, T146F, V178P, L188F) or (S72G, A74V, T146F, V178P, L188K) or (S72G, A74V, T146F, V178P, L188R) or (S72G, A74V, T146F, V178W) or (S72G, A74V, T146F, V178W, L181Y) or (S72G, A74V, T146F, V178W, L181Y, L188K) or (S72G, A74V, T146F, V178W, L181Y, L188R) or (S72G, A74V, T146F, V178W, L188F) or (S72G, A74V, T146F, V178W, L188K) or (S72G, A74V, T146F, V178W, L188R) or (S72G, A74V, V178P) or (S72G, A74V, V178P, L181Y) or (S72G, A74V, V178P, L181Y, L188F) or (S72G, A74V, V178P, L181Y, L188K) or (S72G, A74V, V178P, L181Y, L188R) or (S72G, A74V, V178P, L188F) or (S72G, A74V, V178P, L188K) or (S72G, A74V, V178P, L188R) or (S72G, A74V, V178W) or (S72G, A74V, V178W, L181Y) or (S72G, A74V, V178W, L181Y, L188F) or (S72G, A74V, V178W, L181Y, L188K) or (S72G, A74V, V178W, L181Y, L188R) or (S72G, A74V, V178W, L188F) or (S72G, A74V, V178W, L188K) or (S72G, A74V, V178W, L188R) or (S72G, A74Y) or (S72G, L181Y) or (S72G, L181Y, L188F) or (S72G, L181Y, L188K) or (S72G, L181Y, L188R) or (S72G, L188F) or (S72G, L188K) or (S72G, L188R) or (S72G, M177Y, V178W) or (S72G, M177Y, V178W, L188K) or (S72G, T146F) or (S72G, T146F, L181Y) or (S72G, T146F, L181Y, L188F) or (S72G, T146F, L181Y, L188K) or (S72G, T146F, L181Y, L188R) or (S72G, T146F, L188F) or (S72G, T146F, L188K) or (S72G, T146F, L188R) or (S72G, T146F, V178P) or (S72G, T146F, V178P, L181Y) or (S72G, T146F, V178P, L181Y, L188F) or (S72G, T146F, V178P, L181Y, L188K) or (S72G, T146F, V178P, L181Y, L188R) or (S72G, T146F, V178P, L188F) or (S72G, T146F, V178P, L188K) or (S72G, T146F, V178P, L188R) or (S72G, T146F, V178W) or (S72G, T146F, V178W, L181Y) or (S72G, T146F, V178W, L181Y, L188F) or (S72G, T146F, V178W, L181Y, L188K) or (S72G, T146F, V178W, L188F) or (S72G, T146F, V178W, L188K) or (S72G, T146F, V178W, L188R) or (S72G, V178P) or (S72G, V178P, L181Y) or (S72G, V178P, L181Y, L188F) or (S72G, V178P, L181Y, L188K) or (S72G, V178P, L181Y, L188R) or (S72G, V178P, L188F) or (S72G, V178P, L188K) or (S72G, V178P, L188R) or (S72G, V178W) or (S72G, V178W, L181Y) or (S72G, V178W, L181Y, L188F) or (S72G, V178W, L181Y, L188K) or (S72G, V178W, L181Y, L188R) or (S72G, V178W, L188F) or (S72G, V178W, L188K) or (S72G, V178W, L188R) or (S72H, A74C) or (S72N, A74C) or (S72N, A74I) or (S72N, A74V) or (S72W) or (S72W, A74V) or (S89C) or (S89E) or (S89G) or (S89I) or (S89L) or (S89N) or (S89Q) or (S89R) or (S89T) or (S89V) or (T146A) or (T146A, D222Y, I263M) or (T146A, F173D) or (T146A, F173V) or (T146A, F205G) or (T146A, F261C) or (T146A, F261S) or (T146A, F261V) or (T146A, G271S) or (T146A, G271T) or (T146A, H266V) or (T146A, I258T, I259S) or (T146A, I259H) or (T146A, I263F) or (T146A, I263L) or (T146A, I263N) or (T146A, I263V) or (T146A, L150A) or (T146A, L150G) or (T146A, L150K) or (T146A, L150R, F173I) or (T146A, L272H) or (T146A, L272S) or (T146A, L272W) or (T146A, M212A) or (T146C) or (T146D) or (T146E) or (T146F) or (T146F, L181Y) or (T146F, L181Y, L188F) or (T146F, L181Y, L188K) or (T146F, L188K) or (T146F, L188R) or (T146F, V178P) or (T146F, V178P, L181Y, L188R) or (T146F, V178P, L188K) or (T146F, V178P, L188R) or (T146F, V178W) or (T146F, V178W, L181Y, L188R) or (T146F, V178W, L188F) or (T146F, V178W, L188K) or (T146F, V178W, L188R) or (T146G) or (T146H) or (T146L) or (T146M) or (T146N) or (T146P) or (T146R) or (T146S) or (T146V) or (T146V, A191T) or (T146Y) or (T149P) or (T260W) or (T268A) or (T268S) or (T269K) or (T327A) or (T327A, A330W) or (T327C) or (T327D) or (T327E) or (T327I) or (T327L) or (T327M) or (T327N) or (T327P) or (T327Q) or (T327S) or (T327V) or (T365C) or (T365D) or (T365F) or (T365G) or (T365H) or (T365I) or (T365K) or (T365L) or (T365N) or (T365P) or (T365Q) or (T365V) or (T365W) or (T365Y) or (T436A) or (T436C) or (T436D) or (T436E) or (T436F) or (T436G) or (T436H) or (T436I) or (T436K) or (T436L) or (T436M) or (T436N) or (T436P) or (T436Q) or (T436R) or (T436S) or (T436V) or (T436W) or (T436Y) or (T438A) or (T438C) or (T438I) or (T438S) or (T438V) or (T49A) or (T49C) or (T49D) or (T49E) or (T49F) or (T49G) or (T49H) or (T49I) or (T49K) or (T49L) or (T49L, S54N) or (T49M) or (T49N) or (T49P) or (T49Q) or (T49R) or (T49R, R50C) or (T49R, R50S, M177Y, V178W, A184Y) or (T49S) or (T49V) or (T49W) or (T49Y) or (T88C) or (T88S) or (T88V) or (V178A) or (V178D) or (V178H) or (V178I) or (V178K) or (V178L) or (V178M) or (V178N) or (V178P) or (V178P, L181Y) or (V178P, L181Y, L188R) or (V178P, L188F) or (V178P, L188K) or (V178P, L188R) or (V178Q) or (V178R) or (V178S) or (V178T) or (V178W) or (V178W, A184Y) or (V178W, L181Y, L188K) or (V178W, L181Y, L188R) or (V178W, L188R) or (V178W, R50S) or (V178Y) or (V26A) or (V26C) or (V26F) or (V26G) or (V26H) or (V26I) or (V26K) or (V26L) or (V26M) or (V26N) or (V26N, R50S, M177Y, V178W, A184Y) or (V26Q) or (V26S) or (V26T) or (V26W) or (V26Y) or (V314A) or (V314E) or (V314F) or (V314H) or (V314P) or (V314Q) or (V314S) or (V314Y) or (V371P) or (V48A) or (V48D) or (V48E) or (V48F) or (V48G) or (V48H) or (V48I) or (V48L) or (V48M) or (V48P) or (V48Q) or (V48R) or (V48S) or (V48T) or (V48W) or (V48Y) or (W325A) or (W325C) or (W325D) or (W325E) or (W325F) or (W325G) or (W325I) or (W325K) or (W325L) or (W325M) or (W325Q) or (W325S) or (W325T) or (W325V) or (W325Y) or (W90Y) or (Y51A) or (Y51C) or (Y51F) or (Y51H) or (Y51I) or (Y51L) or (Y51M) or (Y51P) or (Y51S, F77V) or (Y51T) or (Y51V) or (Y51W) or (A225C) or (A225M) or (A225N) or (A225Q) or (A225S) or (A225T) or (A225Y) or (A44Q) or (A44T) or (D182A) or (D182C) or (D182E) or (D182H) or (D182I) or (D182M) or (D182N) or (D182V) or (D182W) or (D80C) or (D80L) or (D80M) or (D80N) or (D80S) or (D80T) or (D80W) or (E140A) or (E140D) or (E140K) or (E140L) or (E140M) or (E140T) or (E183D) or (E337L) or (E337V) or (G114C) or (G114K) or (G114L) or (G114N) or (G114W) or (G227N) or (G227R) or (G240A) or (G240C) or (G240H) or (G240K) or (G240N) or (G240R) or (G240S) or (H236A) or (H236C) or (H236D) or (H236F) or (H236I) or (H236K) or (H236M) or (H236P) or (H236R) or (H236S) or (H92F) or (H92Y) or (I174T) or (I174V) or (I258C) or (I258L) or (I258M) or (I258V) or (K187A) or (K187G) or (K187N) or (K187R) or (K440C) or (K440M) or (K440N) or (K440T) or (K76C) or (K76E) or (K76F) or (K76H) or (K76I) or (K76N) or (K76V) or (M5C) or (M5E) or (M5P) or (N186A) or (N186D) or (N186E) or (N186F) or (N186H) or (N186K) or (N186L) or (N186M) or (N186Q) or (N186T) or (N186V) or (N186Y) or (P172A) or (P172D) or (P172G) or (Q189E) or (Q189I) or (Q189K) or (Q189N) or (Q189V) or (Q397R) or (Q403K) or (Q403R) or (Q404F) or (Q404Y) or (Q73E) or (Q73F) or (Q73L) or (Q73S) or (Q73T) or (Q73W) or (Q73Y) or (R179A) or (R179H) or (R179L) or (R179M) or (R179P) or (R179V) or (R190C) or (R190G) or (R190K) or (R190M) or (R190N) or (R190S) or (R190V) or (R190W) or (R79K) or (S270A) or (S270D) or (S53C) or (T175F) or (T175G) or (T175H) or (T175L) or (T175M) or (T175N) or (T175Q) or (T175R) or (T175Y) or (T269V) or (V299L) or (V299W) or (A225V, H236K, G240V, T269V) or (D80I, D182H, A225V, G240V, T269V) or (F173W, R179L, T269V, K440C) or (F173W, R190V, H236K, T269V) or (H236K, G240V, T269V, K440C) or (Q73W, D80I, N186V, G240V) or (R179L, A225S) or (T175M, H236D) or (T175M, R190V).

[0216] There is provided a second preferred subset comprising variants according to the sixth embodiment, wherein the P450-BM3 variants have an improved selectivity (as determined by SF or TPR) for C19 hydroxylation in comparison with the parent variant (see FIG. 1b). Comprised within this subset are variants comprising at least the mutation(s) (A184D) or (A184D, L188K) or (A184E) or (A184F) or (A184G) or (A184H) or (A184I) or (A184K) or (A184L) or (A184N) or (A184Q) or (A184R) or (A184W) or (A184W, L188F) or (A184Y) or (A184Y, L188K) or (A184Y, R50S) or (A221S) or (A264V) or (A321C) or (A321D) or (A321E) or (A321G) or (A321I) or (A321N) or (A321T) or (A321V) or (A328P) or (A330C) or (A330D) or (A330E) or (A330F) or (A330G) or (A330H) or (A330I) or (A330K) or (A330L) or (A330M) or (A330N) or (A330Q) or (A330R) or (A330S) or (A330T) or (A330T, E352A) or (A330T, F331V) or (A330V) or (A330W) or (A330Y) or (A330Y, W367C) or (A33V) or (A399C) or (A399E) or (A399G) or (A399I) or (A399L) or (A399M) or (A399N) or (A399Q) or (A399R) or (A399S) or (A399T) or (A399V) or (A74C) or (A74C, L75V) or (A74D) or (A74D, F81V) or (A74E) or (A74F) or (A74G) or (A74G, L75C) or (A74H) or (A74I) or (A74I, A184W, L188F) or (A74I, F77A, L181Y, A184W) or (A74I, L181Y, L188K) or (A74I, L181Y, L188R) or (A74I, L188F) or (A74I, L188K) or (A74I, L188R) or (A74I, M177Y, A184R, L188F) or (A74I, M177Y, V178P, A184G) or (A74I, T146F) or (A74I, T146F, L181Y) or (A74I, T146F, L181Y, L188K) or (A74I, T146F, L181Y, L188R) or (A74I, T146F, L188F) or (A74I, T146F, L188K) or (A74I, T146F, V178P) or (A74I, T146F, V178P, L181Y, L188F) or (A74I, T146F, V178P, L181Y, L188K) or (A74I, T146F, V178P, L188K) or (A74I, T146F, V178P, L188R) or (A74I, T146F, V178W) or (A74I, T146F, V178W, L181Y, L188F) or (A74I, T146F, V178W, L181Y, L188R) or (A74I, T146F, V178W, L188F) or (A74I, T146F, V178W, L188K) or (A74I, T146F, V178W, L188R) or (A74I, V178P) or (A74I, V178P, L181Y) or (A74I, V178P, L181Y, L188R) or (A74I, V178P, L188F) or (A74I, V178P, L188K) or (A74I, V178P, L188R) or (A74I, V178W, L188F) or (A74I, V178W, L188K) or (A74I, V178W, L188R) or (A74K) or (A74L) or (A74M) or (A74N) or (A74P) or (A74Q) or (A74R) or (A74R, L75V) or (A74S) or (A74T) or (A74T, A184D) or (A74T, F77A, L181Y, A184D, L188K) or (A74T, F77A, V178W, A184Y) or (A74T, F77L, L181Y, A184D, L188K) or (A74T, L181Y) or (A74T, L181Y, A184D, L188K) or (A74T, L181Y, A184Y, L188K) or (A74T, L181Y, L188K) or (A74T, L181Y, L188R) or (A74T, L188K) or (A74T, M177Y, L181Y, A184D, L188K) or (A74T, T146F, L181Y, A184D, L188K) or (A74T, T146F, L181Y, L188K) or (A74T, T146F, L181Y, L188R) or (A74T, T146F, L188F) or (A74T, T146F, L188K) or (A74T, T146F, L188R) or (A74T, T146F, V178P) or (A74T, T146F, V178P, L181Y) or (A74T, T146F, V178P, L188K) or (A74T, T146F, V178P, L188R) or (A74T, T146F, V178W) or (A74T, T146F, V178W, L181Y) or (A74T, T146F, V178W, L181Y, L188K) or (A74T, T146F, V178W, L188R) or (A74T, V178P) or (A74T, V178P, L188F) or (A74T, V178P, L188K) or (A74T, V178P, L188R) or (A74T, V178W, L181Y, L188K) or (A74T, V178W, L188K) or (A74T, V178W, L188R) or (A74V) or (A74V, F77A, A184N, L188F) or (A74V, L181Y) or (A74V, L181Y, A184D, L188K) or (A74V, L181Y, A184W, L188F) or (A74V, L181Y, L188F) or (A74V, L188F) or (A74V, L188K) or (A74V, L75V) or (A74V, T146F, L181Y, L188K) or (A74V, T146F, L181Y, L188R) or (A74V, T146F, L188K) or (A74V, T146F, L188R) or (A74V, T146F, V178W) or (A74V, T146F, V178W, L181Y, L188F) or (A74V, V178P, A184W, L188K) or (A74V, V178P, L181Y, L188F) or (A74V, V178P, L181Y, L188K) or (A74V, V178P, L181Y, L188R) or (A74V, V178P, L188F) or (A74V, V178W, L188K) or (A74W) or (A74Y) or (D168Y, F173D) or (D363G, T438C) or (E13D, R47L) or (E143A) or (E143C) or (E143D) or (E143F) or (E143G) or (E143I) or (E143K) or (E143L) or (E143M) or (E143N) or (E143P) or (E143Q) or (E143R) or (E143S) or (E143V) or (E143W) or (E143Y) or (E267A) or (E267C) or (E267D) or (E267G) or (E267K) or (E267P) or (E267R) or (E267S) or (E267T) or (E267Y) or (E352A) or (E352D) or (E352F) or (E352G) or (E352I) or (E352L) or (E352M) or (E352N) or (E352P) or (E352R) or (E352S) or (E352T) or (E352V) or (E352W) or (E352Y) or (E64A) or (E64G) or (E64H) or (E64I) or (E64K) or (E64L) or (E64M) or (E64N) or (E64Q) or (E64V) or (E64W) or (E64Y) or (E82P) or (E93G) or (F173C) or (F173C, F205G) or (F173D) or (F173I) or (F173K) or (F173L) or (F173M) or (F173N) or (F173P) or (F173Q) or (F173R) or (F173S) or (F173S, F205P) or (F173V) or (F173W) or (F173Y) or (F173Y, I174F) or (F205A) or (F205C) or (F205D) or (F205D, D208N) or (F205E) or (F205G) or (F205H) or (F205I) or (F205K) or (F205L) or (F205M) or (F205N) or (F205P) or (F205R) or (F205S) or (F205T) or (F205V) or (F205W) or (F205Y) or (F261A) or (F261C) or (F261D) or (F261G) or (F261I) or (F261L) or (F261M) or (F261N) or (F261Q) or (F261S) or (F261T) or (F261V) or (F261W) or (F261Y) or (F331C) or (F331H) or (F331I) or (F331L) or (F331M) or (F331N) or (F331P) or (F331T) or (F331V) or (F331W) or (F331Y) or (F393M) or (F393W) or (F77A) or (F77A, A184W) or (F77A, L181P, A184Y, L188K) or (F77A, M177Y) or (F77C) or (F77D) or (F77E) or (F77G) or (F77H) or (F77I) or (F77K) or (F77L) or (F77M) or (F77N) or (F77P) or (F77R) or (F77S) or (F77T) or (F77V) or (F77V, L86M) or (F77W) or (F77Y) or (F81A) or (F81C) or (F81D) or (F81I) or (F81L) or (F81P) or (F81R) or (F81S) or (F81T) or (F81V) or (F81W) or (F81Y) or (G271A) or (G271C) or (G271D) or (G271E) or (G271F) or (G271H) or (G271K) or (G271L) or (G271 M) or (G271N) or (G271P) or (G271Q) or (G271R) or (G271S) or (G271T) or (G271V) or (G271W) or (G271Y) or (G402A) or (G415A) or (G415D) or (G415S) or (G415T) or (G415V) or (G85A) or (G85L) or (G85S) or (H266A) or (H266C) or (H266D) or (H266E) or (H266F) or (H266G) or (H266I) or (H266K) or (H266M) or (H266N) or (H266P) or (H266Q) or (H266R) or (H266S) or (H266T) or (H266V) or (H266W) or (H266Y) or (I153F, G271L) or (I153L) or (I153L, F173Y) or (I259A) or (I259C) or (I259D) or (I259F) or (I259G) or (I259H) or (I259K) or (I259L) or (I259M) or (I259N) or (I259Q) or (I259S) or (I259T) or (I259V) or (I259W) or (I259Y) or (I263A) or (I263C) or (I263E) or (I263F) or (I263G) or (I263H, A264G) or (I263K) or (I263L) or (I263M) or (I263N) or (I263Q) or (I263S) or (I263T) or (I263V) or (I263Y) or (I401A) or (I401L) or (I401M) or (I401T) or (I401V) or (K210E) or (K210T, G271V) or (K224C) or (K224E) or (K224F) or (K224H) or (K224I) or (K224L) or (K224M) or (K224P) or (K224Q) or (K224W) or (K224Y) or (L150A) or (L150C) or (L150D) or (L150E) or (L150F) or (L150G) or (L150H) or (L150I) or (L150K) or (L150M) or (L150N) or (L150Q) or (L150R) or (L150R, F205R) or (L150S) or (L150S, F173L) or (L150T) or (L150V) or (L150W) or (L150Y) or (L181H) or (L181I) or (L181M) or (L181P) or (L181V) or (L181Y) or (L181Y, A184D) or (L181Y, L188F) or (L181Y, L188K) or (L181Y, L188K, H659R) or (L188A) or (L188D) or (L188E) or (L188F) or (L188H) or (L188I) or (L188K) or (L188M) or (L188N) or (L188Q) or (L188R) or (L188S) or (L188W) or (L20C) or (L20D) or (L20E) or (L20F) or (L20G) or (L20G, R47L) or (L20I) or (L20M) or (L20N) or (L20P) or (L20R) or (L20S) or (L20T) or (L20V) or (L20W) or (L20Y) or (L262I) or (L262V) or (L262W) or (L262Y) or (L272A) or (L272C) or (L272E) or (L272F) or (L272G) or (L272I) or (L272K) or (L272M) or (L272N) or (L272Q) or (L272R) or (L272S) or (L272T) or (L272V) or (L272W) or (L272Y) or (L29A) or (L29C) or (L29D) or (L29F) or (L29H) or (L29I) or (L29M) or (L29M, R47G) or (L29P) or (L29Q) or (L29S) or (L29T) or (L29V) or (L29W) or (L29Y) or (L324F) or (L356C) or (L356F) or (L356H) or (L356I) or (L356M) or (L356N) or (L356Q) or (L356S) or (L356T) or (L356V) or (L356W) or (L437I) or (L437M) or (L75H, F81S) or (L75I) or (L75I, F81C) or (L75I, F81G) or (L75I, F81H) or (L75I, F81I) or (L75I, F81L) or (L75I, F81S) or (L75I, F81V) or (L75I, F81Y) or (L75V) or (L75V, F81C) or (L75V, F81H) or (L75V, F81I) or (L75V, F81L) or (L75V, F81V) or (L75V, F81Y) or (L78F) or (L78I) or (L78M) or (L78V) or (L78Y) or (L86A, S89T) or (L86I) or (L86I, S89T) or (L86M) or (L86M, S89T) or (L86N, S89T) or (L86V) or (L86V, S89T) or (M118A) or (M118E) or (M118F) or (M118G) or (M118H) or (M118I) or (M118K) or (M118L) or (M118N) or (M118P) or (M118Q) or (M118S) or (M118T) or (M118V) or (M118W) or (M118Y) or (M177A) or (M177C) or (M177C, V178Y) or (M177D) or (M177E) or (M177F) or (M177H) or (M177I) or (M177K) or (M177L) or (M177N) or (M177P) or (M177Q) or (M177R) or (M177T) or (M177V) or (M177Y) or (M177Y, A184W) or (M177Y, A184Y) or (M177Y, M 185V) or (M177Y, R50S) or (M177Y, V178P) or (M177Y, V178P, A184Y, L188F) or (M177Y, V178W) or (M177Y, V178W, A184Y) or (M177Y, V178W, A184Y, L188F) or (M185C) or (M185D) or (M185E) or (M185G) or (M185H) or (M185K) or (M185L) or (M185N) or (M185Q) or (M185R) or (M185V) or (M185Y) or (M212A) or (M212C) or (M212C, I259L) or (M212D) or (M212E) or (M212F) or (M212G) or (M212H) or (M212K) or (M212L) or (M212L, I259F) or (M212P) or (M212Q) or (M212R) or (M212S) or (M212T) or (M212V) or (M212W) or (M212Y) or (M354A) or (M354C) or (M354D) or (M354E) or (M354G) or (M354I) or (M354K) or (M354K, D363Y) or (M354L) or (M354N) or (M354Q) or (M354R) or (M354S) or (M354T) or (M354V) or (M354W) or (M354Y) or (N70A) or (N70C) or (N70F) or (N70G) or (N70H) or (N70K) or (N70R) or (N70W) or (N70Y) or (P243T, H266L) or (P326C) or (P326D) or (P326G) or (P326N) or (P326S) or (P326T) or (P329A) or (P329C) or (P329G) or (P329K) or (P329S) or (P329T) or (P392C) or (P392G) or (P392Q) or (P392R) or (P392V) or (P9S) or (R147C, H266G) or (R161C, G271D) or (R190L, F261V) or (R203C) or (R255A) or (R255F) or (R255G) or (R255I) or (R255K) or (R255L) or (R255M) or (R255N) or (R255P) or (R255T) or (R255W) or (R323C) or (R47A) or (R47C) or (R47D) or (R47E) or (R47F) or (R47G) or (R47H) or (R47H, A74W) or (R47I) or (R47K) or (R47L) or (R47M) or (R47N) or (R47P) or (R47Q) or (R47S) or (R47T) or (R47V) or (R47W) or (R50A) or (R50C) or (R50D) or (R50E) or (R50F) or (R50G) or (R50I) or (R50L) or (R50M) or (R50N) or (R50P) or (R50Q) or (R50S) or (R50S, A184W, L188F) or (R50S, A74I, A184W, L188F) or (R50S, A74M, A184Y, L188K) or (R50S, A74T, L181Y, A184D, L188K, G240R) or (R50S, A74V) or (R50S, M177Y, V178P, A184Y) or (R50S, M177Y, V178W, A184W) or (R50S, M177Y, V178W, A184Y) or (R50S, M177Y, V178W, A184Y, A330R) or (R50S, M177Y, V178W, A184Y, A74V, G677D) or (R50S, M177Y, V178W, A184Y, H266S) or (R50S, M177Y, V178W, A184Y, L181P) or (R50S, M177Y, V178W, A184Y, L181Y) or (R50S, M177Y, V178W, A184Y, L188K) or (R50S, M177Y, V178W, A184Y, L188R) or (R50S, M177Y, V178W, A184Y, T146F) or (R50S, M177Y, V178W, A184Y, V26N) or (R50S, M177Y, V178W, L181Y, A184Y) or (R50S, S72G, A74V) or (R50S, S72G, A74V, M177Y, A184Y) or (R50S, S72G, A74V, M177Y, V178P, A184Y) or (R50S, S72G, A74V, M177Y, V178W, A184Y) or (R50S, S72G, A74V, M177Y, V178W, A184Y, L188R) or (R50S, T146F, M177Y, V178W, A184Y) or (R50V) or (R50Y) or (S164N, F261L) or (S176A, A184Y, L188K) or (S176C) or (S176D) or (S176E) or (S176F) or (S176G) or (S176H) or (S176K) or (S176L) or (S176M) or (S176N) or (S176P) or (S176Q) or (S176R) or (S72C, A74C) or (S72C, A74I) or (S72C, A74L) or (S72C, A74V) or (S72C, A74Y) or (S72D, A74C) or (S72D, A74F) or (S72G) or (S72G, A74C) or (S72G, A74F) or (S72G, A74H) or (S72G, A74I) or (S72G, A74I, A184W, L188F) or (S72G, A74I, F77A, M177Y) or (S72G, A74I, F77L) or (S72G, A74I, F77L, M177Y) or (S72G, A74I, L181Y) or (S72G, A74I, L181Y, L188F) or (S72G, A74I, L181Y, L188K) or (S72G, A74I, L181Y, L188R) or (S72G, A74I, L188F) or (S72G, A74I, L188K) or (S72G, A74I, L188R) or (S72G, A74I, T146F) or (S72G, A74I, T146F, L181Y) or (S72G, A74I, T146F, L181Y, L188F) or (S72G, A74I, T146F, L181Y, L188K) or (S72G, A74I, T146F, L181Y, L188R) or (S72G, A74I, T146F, L188F) or (S72G, A74I, T146F, L188K) or (S72G, A74I, T146F, L188R) or (S72G, A74I, T146F, V178P) or (S72G, A74I, T146F, V178P, L181Y) or (S72G, A74I, T146F, V178P, L181Y, L188F) or (S72G, A74I, T146F, V178P, L181Y, L188K) or (S72G, A74I, T146F, V178P, L181Y, L188R) or (S72G, A74I, T146F, V178P, L188F) or (S72G, A74I, T146F, V178P, L188K) or (S72G, A74I, T146F, V178P, L188R) or (S72G, A74I, T146F, V178W) or (S72G, A74I, T146F, V178W, L181Y) or (S72G, A74I, T146F, V178W, L181Y, L188F) or (S72G, A74I, T146F, V178W, L181Y, L188K) or (S72G, A74I, T146F, V178W, L181Y, L188R) or (S72G, A74I, T146F, V178W, L188F) or (S72G, A74I, T146F, V178W, L188K) or (S72G, A74I, T146F, V178W, L188R) or (S72G, A74I, V178P) or (S72G, A74I, V178P, L181Y) or (S72G, A74I, V178P, L181Y, L188K) or (S72G, A74I, V178P, L181Y, L188R) or (S72G, A74I, V178P, L188F) or (S72G, A74I, V178P, L188K) or (S72G, A74I, V178P, L188R) or (S72G, A74I, V178W) or (S72G, A74I, V178W, L181Y, L188F) or (S72G, A74I, V178W, L181Y, L188R) or (S72G, A74I, V178W, L188F) or (S72G, A74I, V178W, L188K) or (S72G, A74I, V178W, L188R) or (S72G, A74L) or (S72G, A74M, A184Y, L188K) or (S72G, A74S) or (S72G, A74T) or (S72G, A74T, L181Y, A184D, L188K) or (S72G, A74T, L181Y, L188F) or (S72G, A74T, L181Y, L188K) or (S72G, A74T, L181Y, L188R) or (S72G, A74T, L188F) or (S72G, A74T, L188K) or (S72G, A74T, L188R) or (S72G, A74T, T146F) or (S72G, A74T, T146F, L181Y) or (S72G, A74T, T146F, L181Y, L188K) or (S72G, A74T, T146F, L181Y, L188R) or (S72G, A74T, T146F, L188F) or (S72G, A74T, T146F, L188K) or (S72G, A74T, T146F, L188R) or (S72G, A74T, T146F, V178P) or (S72G, A74T, T146F, V178P, L181Y) or (S72G, A74T, T146F, V178P, L188F) or (S72G, A74T, T146F, V178P, L188K) or (S72G, A74T, T146F, V178P, L188R) or (S72G, A74T, T146F, V178W) or (S72G, A74T, T146F, V178W, L181Y) or (S72G, A74T, T146F, V178W, L181Y, L188F) or (S72G, A74T, T146F, V178W, L181Y, L188K) or (S72G, A74T, T146F, V178W, L181Y, L188R) or (S72G, A74T, T146F, V178W, L188F) or (S72G, A74T, T146F, V178W, L188K) or (S72G, A74T, T146F, V178W, L188R) or (S72G, A74T, V178P) or (S72G, A74T, V178P, L181Y) or (S72G, A74T, V178P, L181Y, L188F) or (S72G, A74T, V178P, L181Y, L188K) or (S72G, A74T, V178P, L188F) or (S72G, A74T, V178P, L188K) or (S72G, A74T, V178P, L188R) or (S72G, A74T, V178W) or (S72G, A74T, V178W, L181Y, L188F) or (S72G, A74T, V178W, L181Y, L188K) or (S72G, A74T, V178W, L188F) or (S72G, A74T, V178W, L188K) or (S72G, A74T, V178W, L188R) or (S72G, A74V) or (S72G, A74V, A184W) or (S72G, A74V, A221V) or (S72G, A74V, F77A) or (S72G, A74V, F77A, M177Y) or (S72G, A74V, F77L, M177Y) or (S72G, A74V, F77S) or (S72G, A74V, L181Y) or (S72G, A74V, L181Y, L188F) or (S72G, A74V, L181Y, L188K) or (S72G, A74V, L188F) or (S72G, A74V, L188K) or (S72G, A74V, L188R) or (S72G, A74V, T146F) or (S72G, A74V, T146F, L181Y) or (S72G, A74V, T146F, L181Y, L188F) or (S72G, A74V, T146F, L181Y, L188K) or (S72G, A74V, T146F, L181Y, L188R) or (S72G, A74V, T146F, L188F) or (S72G, A74V, T146F, L188K) or (S72G, A74V, T146F, L188R) or (S72G, A74V, T146F, V178P) or (S72G, A74V, T146F, V178P, L181Y) or (S72G, A74V, T146F, V178P, L181Y, L188F) or (S72G, A74V, T146F, V178P, L181Y, L188K) or (S72G, A74V, T146F, V178P, L181Y, L188R) or (S72G, A74V, T146F, V178P, L188F) or (S72G, A74V, T146F, V178P, L188K) or (S72G, A74V, T146F, V178P, L188R) or (S72G, A74V, T146F, V178W) or (S72G, A74V, T146F, V178W, L181Y) or (S72G, A74V, T146F, V178W, L181Y, L188K) or (S72G, A74V, T146F, V178W, L181Y, L188R) or (S72G, A74V, T146F, V178W, L188F) or (S72G, A74V, T146F, V178W, L188K) or (S72G, A74V, T146F, V178W, L188R) or (S72G, A74V, V178P) or (S72G, A74V, V178P, L181Y) or (S72G, A74V, V178P, L181Y, L188F) or (S72G, A74V, V178P, L181Y, L188K) or (S72G, A74V, V178P, L181Y, L188R) or (S72G, A74V, V178P, L188F) or (S72G, A74V, V178P, L188K) or (S72G, A74V, V178P, L188R) or (S72G, A74V, V178W) or (S72G, A74V, V178W, L181Y) or (S72G, A74V, V178W, L181Y, L188F) or (S72G, A74V, V178W, L181Y, L188K) or (S72G, A74V, V178W, L181Y, L188R) or (S72G, A74V, V178W, L188F) or (S72G, A74V, V178W, L188K) or (S72G, A74V, V178W, L188R) or (S72G, A74Y) or (S72G, L181Y) or (S72G, L181Y, L188F) or (S72G, L181Y, L188K) or (S72G, L181Y, L188R) or (S72G, L188F) or (S72G, L188K) or (S72G, L188R) or (S72G, M177Y, V178W) or (S72G, M177Y, V178W, L188K) or (S72G, T146F) or (S72G, T146F, L181Y) or (S72G, T146F, L181Y, L188F) or (S72G, T146F, L181Y, L188K) or (S72G, T146F, L181Y, L188R) or (S72G, T146F, L188F) or (S72G, T146F, L188K) or (S72G, T146F, L188R) or (S72G, T146F, V178P) or (S72G, T146F, V178P, L181Y) or (S72G, T146F, V178P, L181Y, L188F) or (S72G, T146F, V178P, L181Y, L188K) or (S72G, T146F, V178P, L181Y, L188R) or (S72G, T146F, V178P, L188F) or (S72G, T146F, V178P, L188K) or (S72G, T146F, V178P, L188R) or (S72G, T146F, V178W) or (S72G, T146F, V178W, L181Y) or (S72G, T146F, V178W, L181Y, L188F) or (S72G, T146F, V178W, L181Y, L188K) or (S72G, T146F, V178W, L188F) or (S72G, T146F, V178W, L188K) or (S72G, T146F, V178W, L188R) or (S72G, V178P) or (S72G, V178P, L181Y) or (S72G, V178P, L181Y, L188F) or (S72G, V178P, L181Y, L188K) or (S72G, V178P, L181Y, L188R) or (S72G, V178P, L188F) or (S72G, V178P, L188K) or (S72G, V178P, L188R) or (S72G, V178W) or (S72G, V178W, L181Y) or (S72G, V178W, L181Y, L188F) or (S72G, V178W, L181Y, L188K) or (S72G, V178W, L181Y, L188R) or (S72G, V178W, L188F) or (S72G, V178W, L188K) or (S72G, V178W, L188R) or (S72H, A74C) or (S72H, A74G) or (S72H, A74S) or (S72H, A74Y) or (S72N, A74C) or (S72N, A74I) or (S72N, A74N) or (S72N, A74V) or (S72T) or (S72W) or (S72W, A74I, A184W, L188F) or (S72W, A74V) or (S72W, L333R) or (S72W, W90Y, V299G) or (S72Y, A74V) or (S89C) or (S89E) or (S89G) or (S89I) or (S89L) or (S89M) or (S89N) or (S89Q) or (S89R) or (S89T) or (S89V) or (T146A) or (T146A, D222Y, I263M) or (T146A, F173D) or (T146A, F173V) or (T146A, F205G) or (T146A, F261C) or (T146A, F261S) or (T146A, F261V) or (T146A, G271R) or (T146A, G271S) or (T146A, G271T) or (T146A, H266T) or (T146A, H266V) or (T146A, I258T, I259S) or (T146A, I259H) or (T146A, I263F) or (T146A, I263L) or (T146A, I263N) or (T146A, I263V) or (T146A, L150A) or (T146A, L150G) or (T146A, L150K) or (T146A, L150R, F173I) or (T146A, L272H) or (T146A, L272R) or (T146A, L272S) or (T146A, L272W) or (T146A, M212A) or (T146C) or (T146D) or (T146E) or (T146F) or (T146F, L181Y) or (T146F, L181Y, L188F) or (T146F, L181Y, L188K) or (T146F, L188K) or (T146F, L188R) or (T146F, V178P) or (T146F, V178P, L181Y, L188R) or (T146F, V178P, L188K) or (T146F, V178P, L188R) or (T146F, V178W) or (T146F, V178W, L181Y, L188R) or (T146F, V178W, L188F) or (T146F, V178W, L188K) or (T146F, V178W, L188R) or (T146G) or (T146H) or (T146L) or (T146M) or (T146N) or (T146P) or (T146R) or (T146S) or (T146V) or (T146V, A191T) or (T146Y) or (T149P) or (T260A) or (T260S) or (T268A) or (T268S) or (T269K) or (T327A) or (T327A, A330W) or (T327C) or (T327D) or (T327E) or (T327G) or (T327I) or (T327L) or (T327M) or (T327N) or (T327P) or (T327Q) or (T327S) or (T327V) or (T365A) or (T365C) or (T365D) or (T365F) or (T365G) or (T365H) or (T365I) or (T365K) or (T365L) or (T365N) or (T365P) or (T365Q) or (T365V) or (T365W) or (T365Y) or (T436A) or (T436C) or (T436D) or (T436E) or (T436F) or (T436G) or (T436H) or (T436I) or (T436K) or (T436L) or (T436M) or (T436N) or (T436P) or (T436Q) or (T436R) or (T436S) or (T436V) or (T436W) or (T436Y) or (T438A) or (T438C) or (T438G) or (T438I) or (T438L) or (T438S) or (T438V) or (T49A) or (T49C) or (T49D) or (T49E) or (T49F) or (T49G) or (T49H) or (T49I) or (T49K) or (T49L) or (T49L, S54N) or (T49M) or (T49N) or (T49P) or (T49Q) or (T49R) or (T49R, R50C) or (T49R, R50S, M177Y, V178W, A184Y) or (T49S) or (T49V) or (T49W) or (T49Y) or (T88A) or (T88C) or (T88S) or (T88V) or (V178D) or (V178F) or (V178H) or (V178I) or (V178K) or (V178L) or (V178M) or (V178N) or (V178P) or (V178P, L181Y) or (V178P, L181Y, L188R) or (V178P, L188F) or (V178P, L188K) or (V178P, L188R) or (V178Q) or (V178R) or (V178S) or (V178T) or (V178W) or (V178W, A184Y) or (V178W, L181Y, L188K) or (V178W, L181Y, L188R) or (V178W, L188R) or (V178W, R50S) or (V178Y) or (V26A) or (V26C) or (V26E) or (V26F) or (V26G) or (V26G, R47S) or (V26H) or (V26I) or (V26K) or (V26L) or (V26M) or (V26N) or (V26N, R50S, M177Y, V178W, A184Y) or (V26Q) or (V26R) or (V26S) or (V26T) or (V26W) or (V26Y) or (V314A) or (V314E) or (V314F) or (V314H) or (V314P) or (V314Q) or (V314S) or (V314Y) or (V48A) or (V48D) or (V48E) or (V48F) or (V48G) or (V48H) or (V48I) or (V48L) or (V48M) or (V48P) or (V48Q) or (V48R) or (V48S) or (V48T) or (V48W) or (V48Y) or (W325A) or (W325C) or (W325D) or (W325E) or (W325F) or (W325G) or (W325I) or (W325K) or (W325L) or (W325M) or (W325Q) or (W325R) or (W325S) or (W325T) or (W325V) or (W325Y) or (W90D) or (W90Y) or (W90Y, V299G, G570D) or (Y51A) or (Y51C) or (Y51E) or (Y51F) or (Y51G) or (Y51H) or (Y51I) or (Y51L) or (Y51M) or (Y51N) or (Y51P) or (Y51Q) or (Y51S) or (Y51S, F77V) or (Y51T) or (Y51V) or (Y51W) or (A225C) or (A225G) or (A225N) or (A225Q) or (A225S) or (A225T) or (A225V) or (A225Y) or (A44G) or (A44Q) or (D182A) or (D182C) or (D182E) or (D182H) or (D182I) or (D182M) or (D182N) or (D182V) or (D182W) or (E140A) or (E140D) or (E140K) or (E140M) or (E140T) or (E183T) or (E337L) or (E409N) or (G114C) or (G114K) or (G114L) or (G114N) or (G114W) or (G240A) or (G240C) or (G240H) or (G240K) or (G240M) or (G240N) or (G240Q) or (G240R) or (G240S) or (G240V) or (G46T) or (H236A) or (H236C) or (H236D) or (H236F) or (H236G) or (H236I) or (H236K) or (H236P) or (H236R) or (H236S) or (H236Y) or (H92F) or (H92Y) or (I174T) or (1174V) or (I258L) or (I258M) or (I258V) or (K187A) or (K187G) or (K187N) or (K187R) or (K440C) or (K440N) or (K440T) or (K76C) or (K76E) or (K76F) or (K76H) or (K76I) or (K76L) or (K76N) or (K76V) or (M5C) or (M5E) or (M5P) or (M5Q) or (N186A) or (N186D) or (N186E) or (N186F) or (N186H) or (N186K) or (N186L) or (N186M) or (N186Q) or (N186T) or (N186V) or (N186Y) or (P172A) or (P172D) or (P172G) or (Q189I) or (Q189K) or (Q189V) or (Q403K) or (Q403R) or (Q404F) or (Q404Y) or (Q73A) or (Q73E) or (Q73F) or (Q73L) or (Q73S) or (Q73T) or (Q73W) or (R179A) or (R179H) or (R179L) or (R179M) or (R179P) or (R179V) or (R190C) or (R190G) or (R190K) or (R190M) or (R190N) or (R190S) or (R190V) or (R190W) or (R79E) or (R79K) or (S270A) or (S270D) or (S270G) or (S53C) or (T175F) or (T175G) or (T175H) or (T175L) or (T175M) or (T175N) or (T175Q) or (T175R) or (T175Y) or (T269A) or (T269V) or (V299L) or (V299W) or (F173W, R179L, R190V, A225V) or (F173W, R179L, R190V, K440C) or (F173W, R179L, T269V, K440C) or (H236K, G240V, T269V, K440C) or (K76I, F173W, R179L, D182I, R190V, K440C) or (R179L, A225V, G240V, K440C) or (R179L, R190V) or (R190V, A225V, T269V, K440C).

[0217] There is provided a third preferred subset comprising variants according to the sixth embodiment, wherein the P450-BM3 variants have an improved product yield or product titer and an improved selectivity (as determined by SF or TPR) for C19 hydroxylation in comparison with the parent variant. Comprised within this subset are variants comprising at least the mutation(s) (A184D) or(A184D, L188K) or (A184E) or (A184F) or (A184G) or (A184H) or (A184I) or (A184K) or (A184L) or (A184N) or (A184Q) or (A184R) or (A184W) or (A184W, L188F) or (A184Y) or (A184Y, L188K) or (A184Y, R50S) or (A221S) or (A264V) or (A321C) or (A321D) or (A321E) or (A321G) or (A321I) or (A321N) or (A321T) or (A321V) or (A330C) or (A330D) or (A330E) or (A330F) or (A330G) or (A330H) or (A330I) or (A330K) or (A330L) or (A330M) or (A330N) or (A330Q) or (A330R) or (A330S) or (A330T) or (A330T, E352A) or (A330V) or (A330W) or (A330Y) or (A330Y, W367C) or (A33V) or (A399C) or (A399E) or (A399G) or (A399I) or (A399L) or (A399M) or (A399N) or (A399Q) or (A399R) or (A399S) or (A399T) or (A399V) or (A74C) or (A74C, L75V) or (A74D) or (A74D, F81V) or (A74E) or (A74F) or (A74H) or (A74I) or (A74I, A184W, L188F) or (A74I, F77A, L181Y, A184W) or (A74I, L181Y, L188R) or (A74I, L188F) or (A74I, L188K) or (A74I, L188R) or (A74I, M177Y, A184R, L188F) or (A74I, M177Y, V178P, A184G) or (A74I, T146F) or (A74I, T146F, L181Y) or (A74I, T146F, L181Y, L188K) or (A74I, T146F, L181Y, L188R) or (A74I, T146F, L188F) or (A74I, T146F, L188K) or (A74I, T146F, V178P) or (A74I, T146F, V178P, L181Y, L188F) or (A74I, T146F, V178P, L181Y, L188K) or (A74I, T146F, V178P, L188K) or (A74I, T146F, V178P, L188R) or (A74I, T146F, V178W) or (A74I, T146F, V178W, L181Y, L188F) or (A74I, T146F, V178W, L181Y, L188R) or (A74I, T146F, V178W, L188F) or (A74I, T146F, V178W, L188K) or (A74I, T146F, V178W, L188R) or (A74I, V178P) or (A74I, V178P, L181Y) or (A74I, V178P, L181Y, L188R) or (A74I, V178P, L188F) or (A74I, V178P, L188K) or (A74I, V178P, L188R) or (A74I, V178W, L188F) or (A74I, V178W, L188R) or (A74K) or (A74L) or (A74M) or (A74N) or (A74P) or (A74Q) or (A74R) or (A74R, L75V) or (A74S) or (A74T) or (A74T, A184D) or (A74T, F77A, L181Y, A184D, L188K) or (A74T, F77A, V178W, A184Y) or (A74T, F77L, L181Y, A184D, L188K) or (A74T, L181Y) or (A74T, L181Y, A184D, L188K) or (A74T, L181Y, A184Y, L188K) or (A74T, L181Y, L188K) or (A74T, L181Y, L188R) or (A74T, L188K) or (A74T, M177Y, L181Y, A184D, L188K) or (A74T, T146F, L181Y, A184D, L188K) or (A74T, T146F, L181Y, L188K) or (A74T, T146F, L181Y, L188R) or (A74T, T146F, L188F) or (A74T, T146F, L188K) or (A74T, T146F, L188R) or (A74T, T146F, V178P) or (A74T, T146F, V178P, L181Y) or (A74T, T146F, V178P, L188K) or (A74T, T146F, V178P, L188R) or (A74T, T146F, V178W) or (A74T, T146F, V178W, L181Y) or (A74T, T146F, V178W, L181Y, L188K) or (A74T, T146F, V178W, L188R) or (A74T, V178P) or (A74T, V178P, L188F) or (A74T, V178P, L188K) or (A74T, V178P, L188R) or (A74T, V178W, L181Y, L188K) or (A74T, V178W, L188K) or (A74T, V178W, L188R) or (A74V) or (A74V, F77A, A184N, L188F) or (A74V, L181Y) or (A74V, L181Y, A184D, L188K) or (A74V, L181Y, A184W, L188F) or (A74V, L181Y, L188F) or (A74V, L188F) or (A74V, L188K) or (A74V, L75V) or (A74V, T146F, L181Y, L188K) or (A74V, T146F, L181Y, L188R) or (A74V, T146F, L188K) or (A74V, T146F, L188R) or (A74V, T146F, V178W, L181Y, L188F) or (A74V, V178P, A184W, L188K) or (A74V, V178P, L181Y, L188F) or (A74V, V178P, L181Y, L188K) or (A74V, V178P, L181Y, L188R) or (A74V, V178P, L188F) or (A74V, V178W, L188K) or (A74W) or (A74Y) or (D363G, T438C) or (E13D, R47L) or (E143A) or (E143C) or (E143D) or (E143F) or (E143G) or (E143I) or (E143K) or (E143L) or (E143M) or (E143N) or (E143P) or (E143Q) or (E143R) or (E143S) or (E143V) or (E143W) or (E143Y) or (E267D) or (E267R) or (E267T) or (E352A) or (E352D) or (E352F) or (E352G) or (E352I) or (E352L) or (E352M) or (E352N) or (E352P) or (E352R) or (E352S) or (E352T) or (E352V) or (E352W) or (E352Y) or (E64A) or (E64G) or (E64H) or (E64K) or (E64L) or (E64M) or (E64N) or (E64Q) or (E64V) or (E64Y) or (E82P) or (E93G) or (F173C) or (F173C, F205G) or (F173D) or (F173I) or (F173K) or (F173L) or (F173M) or (F173N) or (F173P) or (F173Q) or (F173R) or (F173S) or (F173S, F205P) or (F173V) or (F173W) or (F173Y) or (F173Y, I174F) or (F205A) or (F205C) or (F205D) or (F205D, D208N) or (F205E) or (F205G) or (F205H) or (F205I) or (F205K) or (F205L) or (F205M) or (F205N) or (F205P) or (F205R) or (F205S) or (F205T) or (F205V) or (F205W) or (F205Y) or (F261A) or (F261C) or (F261D) or (F261G) or (F261I) or (F261L) or (F261M) or (F261Q) or (F261S) or (F261T) or (F261V) or (F261Y) or (F331H) or (F331I) or (F331L) or (F331M) or (F331V) or (F331W) or (F331Y) or (F393M) or (F393W) or (F77A) or (F77A, A184W) or (F77A, L181P, A184Y, L188K) or (F77A, M177Y) or (F77C) or (F77D) or (F77E) or (F77G) or (F77H) or (F77I) or (F77K) or (F77L) or (F77M) or (F77N) or (F77P) or (F77R) or (F77S) or (F77T) or (F77V) or (F77V, L86M) or (F77W) or (F77Y) or (F81D) or (F81I) or (F81L) or (F81R) or (F81S) or (F81V) or (F81W) or (F81Y) or (G271A) or (G271C) or (G271D) or (G271E) or (G271F) or (G271H) or (G271K) or (G271L) or (G271M) or (G271N) or (G271P) or (G271Q) or (G271S) or (G271T) or (G271V) or (G271W) or (G271Y) or (G402A) or (G415A) or (G415D) or (G415S) or (G415T) or (G415V) or (G85A) or (G85L) or (G85S) or (H266A) or (H266C) or (H266E) or (H266F) or (H266I) or (H266K) or (H266M) or (H266N) or (H266Q) or (H266S) or (H266V) or (H266W) or (H266Y) or (I153F, G271L) or (I153L) or (I153L, F173Y) or (I259A) or (I259C) or (I259D) or (I259F) or (I259H) or (I259K) or (I259L) or (I259M) or (I259N) or (I259Q) or (I259S) or (I259T) or (I259V) or (I263A) or (I263C) or (I263E) or (I263F) or (I263H, A264G) or (I263K) or (I263L) or (I263M) or (I263N) or (I263Q) or (I263S) or (I263V) or (I263Y) or (I401A) or (I401M) or (I401T) or (I401V) or (K210E) or (K210T, G271V) or (K224C) or (K224E) or (K224H) or (K224I) or (K224L) or (K224M) or (K224P) or (K224Q) or (K224W) or (K224Y) or (L150A) or (L150C) or (L150D) or (L150E) or (L150F) or (L150G) or (L150H) or (L150I) or (L150K) or (L150M) or (L150N) or (L150Q) or (L150R) or (L150R, F205R) or (L150S) or (L150S, F173L) or (L150T) or (L150V) or (L150W) or (L150Y) or (L181H) or (L181I) or (L181M) or (L181P) or (L181V) or (L181Y) or (L181Y, A184D) or (L181Y, L188F) or (L181Y, L188K) or (L181Y, L188K, H659R) or (L188A) or (L188D) or (L188E) or (L188F) or (L188H) or (L188I) or (L188K) or (L188M) or (L188N) or (L188Q) or (L188R) or (L188S) or (L188W) or (L20C) or (L20D) or (L20E) or (L20F) or (L20G) or (L20G, R47L) or (L20I) or (L20M) or (L20N) or (L20P) or (L20R) or (L20S) or (L20T) or (L20V) or (L20W) or (L20Y) or (L262I) or (L262V) or (L262W) or (L272A) or (L272C) or (L272E) or (L272F) or (L272G) or (L272I) or (L272K) or (L272M) or (L272N) or (L272Q) or (L272S) or (L272T) or (L272V) or (L272W) or (L272Y) or (L29A) or (L29C) or (L29D) or (L29F) or (L29H) or (L29I) or (L29M) or (L29M, R47G) or (L29Q) or (L29S) or (L29T) or (L29V) or (L29W) or (L29Y) or (L324F) or (L356C) or (L356F) or (L356I) or (L356M) or (L356V) or (L437I) or (L437M) or (L75I) or (L75I, F81C) or (L75I, F81I) or (L75I, F81L) or (L75I, F81S) or (L75I, F81V) or (L75V) or (L75V, F81C) or (L75V, F81L) or (L75V, F81V) or (L75V, F81Y) or (L78F) or (L78I) or (L78M) or (L78V) or (L86I) or (L86I, S89T) or (L86M) or (L86M, S89T) or (L86V) or (M118A) or (M118E) or (M118F) or (M118G) or (M118H) or (M118I) or (M118K) or (M118L) or (M118N) or (M118P) or (M118Q) or (M118S) or (M118T) or (M118V) or (M118W) or (M118Y) or (M177A) or (M177C) or (M177C, V178Y) or (M177D) or (M177E) or (M177F) or (M177H) or (M177I) or (M177L) or (M177N) or (M177P) or (M177Q) or (M177R) or (M177T) or (M177V) or (M177Y) or (M177Y, A184W) or (M177Y, A184Y) or (M177Y, M185V) or (M177Y, R50S) or (M177Y, V178P) or (M177Y, V178P, A184Y, L188F) or (M177Y, V178W) or (M177Y, V178W, A184Y) or (M177Y, V178W, A184Y, L188F) or (M185C) or (M185D) or (M185E) or (M185G) or (M185H) or (M185K) or (M185L) or (M185N) or (M185Q) or (M185V) or (M212A) or (M212C) or (M212D) or (M212E) or (M212F) or (M212G) or (M212H) or (M212K) or (M212L) or (M212L, I259F) or (M212Q) or (M212R) or (M212S) or (M212T) or (M212V) or (M212W) or (M212Y) or (M354A) or (M354C) or (M354D) or (M354E) or (M354G) or (M354I) or (M354K) or (M354K, D363Y) or (M354L) or (M354N) or (M354Q) or (M354R) or (M354S) or (M354T) or (M354V) or (M354W) or (M354Y) or (N70A) or (N70C) or (N70F) or (N70G) or (N70H) or (N70K) or (N70R) or (N70Y) or (P243T, H266L) or (P329A) or (P392C) or (P392G) or (P392Q) or (P392R) or (P392V) or (P9S) or (R147C, H266G) or (R161C, G271D) or (R190L, F261V) or (R203C) or (R255A) or (R255G) or (R255I) or (R255K) or (R255L) or (R255M) or (R255N) or (R255P) or (R255T) or (R255W) or (R47A) or (R47C) or (R47D) or (R47E) or (R47F) or (R47G) or (R47H) or (R47H, A74W) or (R47I) or (R47K) or (R47L) or (R47M) or (R47N) or (R47P) or (R47Q) or (R47S) or (R47T) or (R47V) or (R47W) or (R50A) or (R50C) or (R50D) or (R50E) or (R50F) or (R50G) or (R50I) or (R50L) or (R50M) or (R50N) or (R50P) or (R50Q) or (R50S) or (R50S, A184W, L188F) or (R50S, A74I, A184W, L188F) or (R50S, A74M, A184Y, L188K) or (R50S, A74T, L181Y, A184D, L188K, G240R) or (R50S, A74V) or (R50S, M177Y, V178P, A184Y) or (R50S, M177Y, V178W, A184W) or (R50S, M177Y, V178W, A184Y) or (R50S, M177Y, V178W, A184Y, A330R) or (R50S, M177Y, V178W, A184Y, A74V, G677D) or (R50S, M177Y, V178W, A184Y, L181P) or (R50S, M177Y, V178W, A184Y, L181Y) or (R50S, M177Y, V178W, A184Y, L188K) or (R50S, M177Y, V178W, A184Y, L188R) or (R50S, M177Y, V178W, A184Y, T146F) or (R50S, M177Y, V178W, A184Y, V26N) or (R50S, M177Y, V178W, L181Y, A184Y) or (R50S, S72G, A74V) or (R50S, S72G, A74V, M177Y, A184Y) or (R50S, S72G, A74V, M177Y, V178P, A184Y) or (R50S, S72G, A74V, M177Y, V178W, A184Y) or (R50S, S72G, A74V, M177Y, V178W, A184Y, L188R) or (R50S, T146F, M177Y, V178W, A184Y) or (R50V) or (R50Y) or (S176A, A184Y, L188K) or (S176C) or (S176D) or (S176E) or (S176F) or (S176G) or (S176H) or (S176K) or (S176L) or (S176M) or (S176N) or (S176P) or (S176Q) or (S72C, A74C) or (S72C, A74I) or (S72C, A74L) or (S72C, A74V) or (S72D, A74C) or (S72G) or (S72G, A74C) or (S72G, A74F) or (S72G, A74H) or (S72G, A74I) or (S72G, A74I, A184W, L188F) or (S72G, A74I, F77A, M177Y) or (S72G, A74I, F77L) or (S72G, A74I, F77L, M177Y) or (S72G, A74I, L181Y) or (S72G, A74I, L181Y, L188F) or (S72G, A74I, L181Y, L188K) or (S72G, A74I, L181Y, L188R) or (S72G, A74I, L188F) or (S72G, A74I, L188K) or (S72G, A74I, L188R) or (S72G, A74I, T146F) or (S72G, A74I, T146F, L181Y) or (S72G, A74I, T146F, L181Y, L188F) or (S72G, A74I, T146F, L181Y, L188K) or (S72G, A74I, T146F, L181Y, L188R) or (S72G, A74I, T146F, L188F) or (S72G, A74I, T146F, L188K) or (S72G, A74I, T146F, V178P) or (S72G, A74I, T146F, V178P, L181Y) or (S72G, A74I, T146F, V178P, L181Y, L188F) or (S72G, A74I, T146F, V178P, L181Y, L188K) or (S72G, A74I, T146F, V178P, L181Y, L188R) or (S72G, A74I, T146F, V178P, L188F) or (S72G, A74I, T146F, V178P, L188K) or (S72G, A74I, T146F, V178P, L188R) or (S72G, A74I, T146F, V178W) or (S72G, A74I, T146F, V178W, L181Y) or (S72G, A74I, T146F, V178W, L181Y, L188F) or (S72G, A74I, T146F, V178W, L181Y, L188K) or (S72G, A74I, T146F, V178W, L181Y, L188R) or (S72G, A74I, T146F, V178W, L188F) or (S72G, A74I, T146F, V178W, L188K) or (S72G, A74I, T146F, V178W, L188R) or (S72G, A74I, V178P) or (S72G, A74I, V178P, L181Y) or (S72G, A74I, V178P, L181Y, L188R) or (S72G, A74I, V178P, L188F) or (S72G, A74I, V178P, L188K) or (S72G, A74I, V178P, L188R) or (S72G, A74I, V178W) or (S72G, A74I, V178W, L181Y, L188F) or (S72G, A74I, V178W, L181Y, L188R) or (S72G, A74I, V178W, L188F) or (S72G, A74I, V178W, L188R) or (S72G, A74L) or (S72G, A74M, A184Y, L188K) or (S72G, A74S) or (S72G, A74T) or (S72G, A74T, L181Y, A184D, L188K) or (S72G, A74T, L181Y, L188F) or (S72G, A74T, L181Y, L188K) or (S72G, A74T, L181Y, L188R) or (S72G, A74T, L188F) or (S72G, A74T, L188K) or (S72G, A74T, L188R) or (S72G, A74T, T146F) or (S72G, A74T, T146F, L181Y) or (S72G, A74T, T146F, L181Y, L188K) or (S72G, A74T, T146F, L181Y, L188R) or (S72G, A74T, T146F, L188F) or (S72G, A74T, T146F, L188K) or (S72G, A74T, T146F, L188R) or (S72G, A74T, T146F, V178P) or (S72G, A74T, T146F, V178P, L181Y) or (S72G, A74T, T146F, V178P, L188F) or (S72G, A74T, T146F, V178P, L188K) or (S72G, A74T, T146F, V178P, L188R) or (S72G, A74T, T146F, V178W) or (S72G, A74T, T146F, V178W, L181Y) or (S72G, A74T, T146F, V178W, L181Y, L188F) or (S72G, A74T, T146F, V178W, L181Y, L188K) or (S72G, A74T, T146F, V178W, L181Y, L188R) or (S72G, A74T, T146F, V178W, L188F) or (S72G, A74T, T146F, V178W, L188K) or (S72G, A74T, T146F, V178W, L188R) or (S72G, A74T, V178P) or (S72G, A74T, V178P, L181Y) or (S72G, A74T, V178P, L181Y, L188F) or (S72G, A74T, V178P, L181Y, L188K) or (S72G, A74T, V178P, L188F) or (S72G, A74T, V178P, L188K) or (S72G, A74T, V178P, L188R) or (S72G, A74T, V178W) or (S72G, A74T, V178W, L181Y, L188F) or (S72G, A74T, V178W, L181Y, L188K) or (S72G, A74T, V178W, L188F) or (S72G, A74T, V178W, L188K) or (S72G, A74T, V178W, L188R) or (S72G, A74V) or (S72G, A74V, A184W) or (S72G, A74V, A221V) or (S72G, A74V, F77A) or (S72G, A74V, F77A, M177Y) or (S72G, A74V, F77L, M177Y) or (S72G, A74V, F77S) or(S72G, A74V, L181Y) or (S72G, A74V, L181Y, L188F) or (S72G, A74V, L181Y, L188K) or (S72G, A74V, L188F) or (S72G, A74V, L188K) or (S72G, A74V, L188R) or (S72G, A74V, T146F) or (S72G, A74V, T146F, L181Y) or (S72G, A74V, T146F, L181Y, L188F) or (S72G, A74V, T146F, L181Y, L188K) or (S72G, A74V, T146F, L181Y, L188R) or (S72G, A74V, T146F, L188F) or (S72G, A74V, T146F, L188K) or (S72G, A74V, T146F, L188R) or (S72G, A74V, T146F, V178P) or (S72G, A74V, T146F, V178P, L181Y) or (S72G, A74V, T146F, V178P, L181Y, L188F) or (S72G, A74V, T146F, V178P, L181Y, L188K) or (S72G, A74V, T146F, V178P, L181Y, L188R) or (S72G, A74V, T146F, V178P, L188F) or (S72G, A74V, T146F, V178P, L188K) or (S72G, A74V, T146F, V178P, L188R) or (S72G, A74V, T146F, V178W) or (S72G, A74V, T146F, V178W, L181Y) or (S72G, A74V, T146F, V178W, L181Y, L188K) or (S72G, A74V, T146F, V178W, L181Y, L188R) or (S72G, A74V, T146F, V178W, L188F) or (S72G, A74V, T146F, V178W, L188K) or (S72G, A74V, T146F, V178W, L188R) or (S72G, A74V, V178P) or (S72G, A74V, V178P, L181Y) or (S72G, A74V, V178P, L181Y, L188F) or (S72G, A74V, V178P, L181Y, L188K) or (S72G, A74V, V178P, L181Y, L188R) or (S72G, A74V, V178P, L188F) or (S72G, A74V, V178P, L188K) or (S72G, A74V, V178P, L188R) or (S72G, A74V, V178W) or (S72G, A74V, V178W, L181Y) or (S72G, A74V, V178W, L181Y, L188F) or (S72G, A74V, V178W, L181Y, L188K) or (S72G, A74V, V178W, L181Y, L188R) or (S72G, A74V, V178W, L188F) or (S72G, A74V, V178W, L188K) or (S72G, A74V, V178W, L188R) or (S72G, A74Y) or (S72G, L181Y) or (S72G, L181Y, L188F) or (S72G, L181Y, L188K) or (S72G, L181Y, L188R) or (S72G, L188F) or (S72G, L188K) or (S72G, L188R) or (S72G, M177Y, V178W) or (S72G, M177Y, V178W, L188K) or (S72G, T146F) or (S72G, T146F, L181Y) or (S72G, T146F, L181Y, L188F) or (S72G, T146F, L181Y, L188K) or (S72G, T146F, L181Y, L188R) or (S72G, T146F, L188F) or (S72G, T146F, L188K) or (S72G, T146F, L188R) or (S72G, T146F, V178P) or (S72G, T146F, V178P, L181Y) or (S72G, T146F, V178P, L181Y, L188F) or (S72G, T146F, V178P, L181Y, L188K) or (S72G, T146F, V178P, L181Y, L188R) or (S72G, T146F, V178P, L188F) or (S72G, T146F, V178P, L188K) or (S72G, T146F, V178P, L188R) or (S72G, T146F, V178W) or (S72G, T146F, V178W, L181Y) or (S72G, T146F, V178W, L181Y, L188F) or (S72G, T146F, V178W, L181Y, L188K) or (S72G, T146F, V178W, L188F) or (S72G, T146F, V178W, L188K) or (S72G, T146F, V178W, L188R) or (S72G, V178P) or (S72G, V178P, L181Y) or (S72G, V178P, L181Y, L188F) or (S72G, V178P, L181Y, L188K) or (S72G, V178P, L181Y, L188R) or (S72G, V178P, L188F) or (S72G, V178P, L188K) or (S72G, V178P, L188R) or (S72G, V178W) or (S72G, V178W, L181Y) or (S72G, V178W, L181Y, L188F) or (S72G, V178W, L181Y, L188K) or (S72G, V178W, L181Y, L188R) or (S72G, V178W, L188F) or (S72G, V178W, L188K) or (S72G, V178W, L188R) or (S72H, A74C) or (S72N, A74C) or (S72N, A74I) or (S72N, A74V) or (S72W) or (S72W, A74V) or (S89C) or (S89E) or (S89G) or (S89I) or (S89L) or (S89N) or (S89Q) or (S89R) or (S89T) or (S89V) or (T146A) or (T146A, D222Y, I263M) or (T146A, F173D) or (T146A, F173V) or (T146A, F205G) or (T146A, F261C) or (T146A, F261S) or (T146A, F261V) or (T146A, G271S) or (T146A, G271T) or (T146A, H266V) or (T146A, I258T, I259S) or (T146A, I259H) or (T146A, I263F) or (T146A, I263L) or (T146A, I263N) or (T146A, I263V) or (T146A, L150A) or (T146A, L150G) or (T146A, L150K) or (T146A, L150R, F173I) or (T146A, L272H) or (T146A, L272S) or (T146A, L272W) or (T146A, M212A) or (T146C) or (T146D) or (T146E) or (T146F) or (T146F, L181Y) or (T146F, L181Y, L188F) or (T146F, L181Y, L188K) or (T146F, L188K) or (T146F, L188R) or (T146F, V178P) or (T146F, V178P, L181Y, L188R) or (T146F, V178P, L188K) or (T146F, V178P, L188R) or (T146F, V178W) or (T146F, V178W, L181Y, L188R) or (T146F, V178W, L188F) or (T146F, V178W, L188K) or (T146F, V178W, L188R) or (T146G) or (T146H) or (T146L) or (T146M) or (T146N) or (T146P) or (T146R) or (T146S) or (T146V) or (T146V, A191T) or (T146Y) or (T149P) or (T268A) or (T268S) or (T269K) or (T327A) or (T327A, A330W) or (T327C) or (T327D) or (T327E) or (T327I) or (T327L) or (T327M) or (T327N) or (T327P) or (T327Q) or (T327S) or (T327V) or (T365C) or (T365D) or (T365F) or (T365G) or (T365H) or (T365I) or (T365K) or (T365L) or (T365N) or (T365P) or (T365Q) or (T365V) or (T365W) or (T365Y) or (T436A) or (T436C) or (T436D) or (T436E) or (T436F) or (T436G) or (T436H) or (T436I) or (T436K) or (T436L) or (T436M) or (T436N) or (T436P) or (T436Q) or (T436R) or (T436S) or (T436V) or (T436W) or (T436Y) or (T438A) or (T438C) or (T438I) or (T438S) or (T438V) or (T49A) or (T49C) or (T49D) or (T49E) or (T49F) or (T49G) or (T49H) or (T49I) or (T49K) or (T49L) or (T49L, S54N) or (T49M) or (T49N) or (T49P) or (T49Q) or (T49R) or (T49R, R50C) or (T49R, R50S, M177Y, V178W, A184Y) or (T49S) or (T49V) or (T49W) or (T49Y) or (T88C) or (T88S) or (T88V) or (V178D) or (V178H) or (V178I) or (V178K) or (V178L) or (V178M) or (V178N) or (V178P) or (V178P, L181Y) or (V178P, L181Y, L188R) or (V178P, L188F) or (V178P, L188K) or (V178P, L188R) or (V178Q) or (V178R) or (V178S) or (V178T) or (V178W) or (V178W, A184Y) or (V178W, L181Y, L188K) or (V178W, L181Y, L188R) or (V178W, L188R) or (V178W, R50S) or (V178Y) or (V26A) or (V26C) or (V26F) or (V26G) or (V26H) or (V26I) or (V26K) or (V26L) or (V26M) or (V26N) or (V26N, R50S, M177Y, V178W, A184Y) or (V26Q) or (V26S) or (V26T) or (V26W) or (V26Y) or (V314A) or (V314E) or (V314F) or (V314H) or (V314P) or (V314Q) or (V314S) or (V314Y) or (V48A) or (V48D) or (V48E) or (V48F) or (V48G) or (V48H) or (V48I) or (V48L) or (V48M) or (V48P) or (V48Q) or (V48R) or (V48S) or (V48T) or (V48W) or (V48Y) or (W325A) or (W325C) or (W325D) or (W325E) or (W325F) or (W325G) or (W325I) or (W325K) or (W325L) or (W325M) or (W325Q) or (W325S) or (W325T) or (W325V) or (W325Y) or (W90Y) or (Y51A) or (Y51C) or (Y51F) or (Y51H) or (Y51I) or (Y51L) or (Y51M) or (Y51P) or (Y51S, F77V) or (Y51T) or (Y51V) or (Y51W) or (A225C) or (A225N) or (A225Q) or (A225S) or (A225T) or (A225Y) or (A44Q) or (D182A) or (D182C) or (D182E) or (D182H) or (D182I) or (D182M) or (D182N) or (D182V) or (D182W) or (E140A) or (E140D) or (E140K) or (E140M) or (E140T) or (E337L) or (G114C) or (G114K) or (G114L) or (G114N) or (G114W) or (G240A) or (G240C) or (G240H) or (G240K) or (G240N) or (G240R) or (G240S) or (H236A) or (H236C) or (H236D) or (H236F) or (H236I) or (H236K) or (H236P) or (H236R) or (H236S) or (H92F) or (H92Y) or (I174T) or (I174V) or (I258L) or (I258M) or (I258V) or (K187A) or (K187G) or (K187N) or (K187R) or (K440C) or (K440N) or (K440T) or (K76C) or (K76E) or (K76F) or (K76H) or (K76I) or (K76N) or (K76V) or (M5C) or (M5E) or (M5P) or (N186A) or (N186D) or (N186E) or (N186F) or (N186H) or (N186K) or (N186L) or (N186M) or (N186Q) or (N186T) or (N186V) or (N186Y) or (P172A) or (P172D) or (P172G) or (Q189I) or (Q189K) or (Q189V) or (Q403K) or (Q403R) or (Q404F) or (Q404Y) or (Q73E) or (Q73F) or (Q73L) or (Q73S) or (Q73T) or (Q73W) or (R179A) or (R179H) or (R179L) or (R179M) or (R179P) or (R179V) or (R190C) or (R190G) or (R190K) or (R190M) or (R190N) or (R190S) or (R190V) or (R190W) or (R79K) or (S270A) or (S270D) or (S53C) or (T175F) or (T175G) or (T175H) or (T175L) or (T175M) or (T175N) or (T175Q) or (T175R) or (T175Y) or (T269V) or (V299L) or (V299W) or (F173W, R179L, T269V, K440C) or (H236K, G240V, T269V, K440C).

[0218] According to one embodiment there is provided a BM3 variant wherein said variant has an improved selectivity and/or product yield or product titer for C19 hydroxylation compared with at least one BM3 variant according to SEQ ID No. 2 to 28, or 117 to 119, preferably with at least one BM3 variant selected from BM3-254, BM3-261, BM3-263, or BM3-268. This embodiment can be and is suggested to be combined with all previous embodiments, in particular with the first, second, third, fourth, fifth and/or sixth embodiment or the described subsets.

[0219] According to a highly preferred embodiment of the current invention, there is provided a BM3 variant for catalyzing the C19 hydroxylation of a steroid or steroid derivative, wherein an amino acid sequence (insert) has been introduced between amino acid positions 458 and 477, and wherein the insert has at least 90%, 95%, 99% or 100% sequence identity with a sequence according to any of SEQ ID No. 123 to 173. Most preferably this embodiment is a BM3 variant according to any of the previously described embodiments of the first aspect.

[0220] It was surprisingly found that BM3 variants for C19 hydroxylation of steroids comprising these amino acid sequence inserts had improved product titer or TPR, for example if the insert was introduced into a BM3 variant with Seq ID No. 118 or 119.

[0221] According to a separate aspect 1B there is provided a BM3 variant characterized by an improved BM3 protein expression relative to BM3 wildtype (WT), wherein the BM3 variant comprises mutations at at least one, two, three, four, five, six, seven, eight, nine, ten or all amino acid positions of (C62), (S106), (Q110), (A117), (Q128), (T152), (G157), (G227), (P243), (H285), (Q288), (A295), (N319), (G368), (V371), (K391), (N395) and (H408). These BM3 variants may also be in accordance with some embodiments of the first aspect.

[0222] In particular provided herein is a BM3 variant characterized by an improved BM3 protein expression relative to BM3 wildtype (WT), wherein the BM3 variant comprises at least one, two, three, four, five, six, seven, eight, nine, ten or all mutations of (C62L), (S106A), (Q110E), (A117P), (Q128E), (T152I), (G157L), (G227P), (P243E), (H285E), (Q288E), (A295D), (N319E), (G368E), (V371P), (K391L), (N395F) and (H408L).

[0223] In some more specific embodiments, there is provided the BM3 variant according to the previous embodiments, wherein the BM3 variant comprises the mutations (S106A, Q128E) or (S106A, H285E, Q288E) or (S106A, Q128E, H285E) or (C62L, A117P, G157L, N319E) or (C62L, G227P, N319E, K391L) or (Q110E, Q128E, Q288E, N319E) or (Q128E, H285E, Q288E, N319E) or (C62L, S106A, A117P, A295D, V371P) or (C62L, S106A, A117P, G227P, P243E) or (C62L, S106A, Q128E, G227P, K391L) or (S106A, Q110E, G227P, H285E, K391L) or (C62L, S106A, Q128E, G227P, Q288E, K391L) or (S106A, G227P, H285E, V371P, K391L, H408L) or (S106A, Q110E, G227P, N319E, K391L, N395F) or (C62L, S106A, Q128E, T152I, G227P, P243E, H408L) or (S106A, Q110E, Q128E, G227P, Q288E, N319E, K391L) or (C62L, S106A, Q128E, G157L, P243E, A295D, G368E, K391L) or (S106A, A117P, Q128E, T152I, G227P, N319E, V371P, N395F).

[0224] As shown in Table E7E and Example 7E, introduction of these mutations resulted in an improved protein expression of the BM3 protein. Protein expression can be measured as known in the art, e.g. by use of SDS PAGE, Western Blot, Mass Spectrometry or any other suitable method. These mutations and BM3 variants can thus be used to solve the same problem, i.e. to improve the C19 hydroxylation.

[0225] As understood by the skilled person, the BM3 embodiments for the improved protein production can be combined and are suggested to be combined with each of the previously described embodiments, which are suitable to improve selectivity or yield for C19 hydroxylation.

[0226] In addition, the BM3 embodiments for the improved protein production are however not restricted to C19 hydroxylation and can also be used more broadly, i.e to improve the protein production for any BM3 protein, independent of its suitability for steroid hydroxylation.

[0227] According to a second aspect of the current invention, there is provided a nucleic acid encoding for a Cytochrome P450 BM3 monooxygenase variant as described herein.

[0228] A defined protein or amino acid sequence may be encoded by various nucleic acid sequences. Where an amino acid sequence has been defined herein, each of the nucleic acids encoding this amino acid sequence shall also be deemed disclosed herein. It is therefore well understood that the nucleic acid sequence as provided e.g. in SEQ ID No. 59 for the wildtype sequence has to be read in an exemplary fashion.

[0229] Preferably, the nucleic acid encodes for a variant according to the first aspect. Even more preferably, the nucleic acid encodes for a variant according to the first aspect, first embodiment or the nucleic acid encodes for a variant according to the first aspect, second embodiment, e.g. variants according to SEQ ID No. 2, 3, 4, 5, 6, 7, 8, 9, 10, 11, 12, 13, 14, 15, 16, 17, 18, 19, 20, 21, 22, 23, 24, 25, 26, 27, 28, 117, 118 or 119 or functional variants derived thereof. Furthermore, the nucleic acid can be a nucleic acid encoding for a variant according to the third, fourth, fifth, or sixth embodiment of the first aspect.

[0230] Nucleic acids according to the second aspect can be generated de novo as known in the art or can be generated by mutating available BM3 nucleic acid sequences. The nucleic acid encoding the P450-BM3 variant according to the current invention can then be introduced into a suitable expression system or host cell for expression of the BM3 variant. Sequences of the nucleic acids can be verified as known in the art. Exemplary methods for sequence verification are disclosed for example in (Green and Sambrook 2012).

[0231] According to a third aspect of the current invention, there is provided a host cell for the production of a Cytochrome P450 BM3 monooxygenase variant. In a preferred embodiment, the host cell comprises a nucleic acid encoding for a BM3 variant according to any of the aspects dercribed herein.

[0232] Suitable expression systems are well known in the art and example systems comprise E. coli strains such as DH5alpha, BL21 (DE3), or Rosetta (DE3), but also various other bacterial and non bacterial systems. In some preferred embodiments, the host cell is a procaryotic cell (e.g. an E. coli cell) or a eukaryotic cell (e.g. a CHO cell). In a preferred embodiment, the host cell is an E. coli cell, e.g. DH5alpha, BL21 (DE3), or Rosetta (DE3). In another preferred embodiment, the host cell is from E. coli strain W3110 (NC_007779.1), JM101 or MG1655 (NC_000913.3). Introduction of nucleic acids encoding for a BM3 variant, e.g. according to the second aspect, into the host cell may occur as known in the art, i.e. using suitable vectors or transfer systems. For example, where bacterial expression systems such as DH5alpha, BL21 (DE3), or Rosetta (DE3) are used, suitable vectors are known in the art, such as pSE420 (Invitrogen), pET21a (EMD Biosciences), pET22b (EMD Millipore), pLys (EMD Biosciences) or pETM11 (EMBL Vector Collection, Germany). For a detailed decription see e.g. section 4.2 “Cloning of cyp102A1 and pETM11-BM3 construction” of Supporting Information of (Acevedo-Rocha 2018) and the examples provided herein.

[0233] According to a fourth aspect of the current invention, there is provided the use of a Cytochrome P450 BM3 monooxygenase (BM3) variant for the production of a compound according to formula I, wherein R¹ and R² form a six-membered ring as part of a steroid.

[chemical structure]

[0234] In a preferred embodiment according to the fourth aspect, formula I is formula (II), wherein R³ is a beta-hydroxy group (-OH) or an oxo group (=O).

[chemical structure]

[0235] As described also elsewhere herein, it was surprisingly found, that BM3 variants can be used for the production of a compound according to formula I and II in a commercially relevant setup, i.e. for an industrial application. To this end, a BM3 variant suitable for catalyzing C19 hydroxylation is incubated with a suitable substrate, e.g. as described in examples 2, 8, 10, 13, 17, 20, 21, 24, 25.

[0236] In some highly preferred embodiments according to the fourth aspect, the substrate for the BM3 variant is a steroid or steroid derivative.

[0237] According to a fifth aspect of the current invention, there is provided the use of a BM3 variant for the C19-hydroxylation of a steroid or steroid derivative.

[0238] As described also elsewhere herein, it was surprisingly found, that BM3 variants can be used for the C19-hydroxylation of a steroid or steroid derivative in a commercially relevant setup, i.e. for an industrial application. To this end, a BM3 variant suitable for catalyzing C19 hydroxylation is incubated with a suitable substrate, e.g. as described in examples 2, 8, 10, 13, 17, 20, 21, 24, 25.

[0239] According to some highly preferred embodiments of the fourth or fifth aspect, the BM3 variant is a variant as described herein. Preferably, the BM3 variant can be a variant according to the first aspect. Even more preferably, the BM3 variant can be a variant according to the first aspect, first embodiment or the BM3 variant can be a variant according to the first aspect, second embodiment, e.g. a variant according to SEQ ID No. 2, 3, 4, 5, 6, 7, 8, 9, 10, 11, 12, 13, 14, 15, 16, 17, 18, 19, 20, 21, 22, 23, 24, 25, 26, 27, 28, 117, 118 or 119, or a variant derived from any of these. Furthermore, the BM3 variant can be a variant according to the third, fourth, fifth, or sixth embodiment of the first aspect.

[0240] In some embodiments according to the fourth or fifth aspect, the BM3 variant is purified prior to incubation with the substrate using a purification technique known in the art, such as but not restricted to immobilized metal affinity chromatography, ion exchange chromatography or size exclusion chromatography. In some other embodiments according to the fourth aspect, the BM3 variant remains in a cell suspension when incubated with the substrate, e.g. no separation of BM3 variant and expression system occurs prior to the biotransformation, e.g. whole-cell biotransformation.

[0241] According to some preferred embodiments of the fourth or fifth aspect said steroid or steroid derivatives comprise a 1,4-dien-3-one-A-ring or a 4-en-3-one-A-ring. According to some even more preferred embodiments according to the fourth or fifth aspect said steroid or steroid derivative is androsta-1,4-dien-3,17-dione (ADD) or (17beta)-17-hydroxyandrosta-1,4-dien-3-one (delta1 testosterone).

[0242] In some embodiments of the fourth or fifth aspect the substrate steroid or steroid derivative is added to the biotransformation reaction as a purified compound. In some embodiments the substrate steroid or steroid derivative is dissolved in a suitable solvent and can be added in solution to the biotransformation mixture. In other embodiments the substrate steroid or steroid derivative is formed in the course of a reaction preceding the C19 hydroxylation. The reaction preceding the C19 hydroxylation reaction may be another biotransformation reaction or a chemical reaction, e.g. a reduction of delta1 testosterone to testosterone or an oxidation of delta1 testosterone to ADD.

[0243] In some embodiments of the fourth or fifth aspect the formed C19 hydroxylated steroid or steroid derivative is extracted from the biotransformation reaction mixture using a method known in the art, e.g. with 4-methyl-2-pentanone (see example 10). In some other embodiments according to the fourth or fifth aspect the formed C19 hydroxylated steroid or steroid derivative is converted into a secondary product. This conversion may occur e.g. by means of biotransformation or chemical reaction. A secondary product may be for example estrone or a derivative thereof.

[0244] Extraction of the C19 hydroxylated steroid or steroid derivative or a secondary product thereof may occur as known in the art, e.g. by stirring the reaction mixture with 4-methyl-2-pentanone, separation of the organic phase and concentration by evaporation of the organic solvents. Further purification of the C19 hydroxylated steroid or steroid derivative or a secondary product thereof may be performed using chromatographic techniques, e.g. flash chromatography using silica gel or preparative HPLC, or crystallization.

[0245] Analysis of the production of the C19 hydroxylated steroid, steroid derivative or secondary product can occur as known in the art, e.g. by using MS- or NMR-methods.

[0246] Suitable biotransformation conditions are described in the examples provided herein. However, it is routine for the skilled person to optimize the reaction conditions for a BM3 variant to obtain optimal yields for the reaction product. For example, incubation may occur in a KH2PO4/K2HPO4 buffer comprising an aqueous EDTA solution in a pH range of 6.6 to 7.4. Suitable incubation times may be for example between 12 and 48 hours.

[0247] According to a sixth aspect of the current invention, there is provided a process for C19-hydroxylation of a steroid or derivative thereof comprising
[0248] [0249] (i) (a) culturing a recombinant Cytochrome P450 BM3 monooxygenase (BM3) variant producing microorganism in a culture medium, in the presence of an exogenous or intermediately formed substrate; or
[0250] (b) incubating a substrate-containing reaction medium with a Cytochrome P450 BM3 monooxygenase; and
[0251] (ii) isolating the oxidation product formed or a secondary product thereof from the medium;
said process being further characterized in that said BM3 variant is a BM3 variant as described herein.

[0252] The recombinant BM3 variant producing microorganism is a microorganism comprising a nucleic acid encoding a BM3 variant. The recombinant BM3 variant producing microorganism can be derived from any suitable expression system. Preferably, the recombinant BM3 variant producing microorganism is a microorganism according to the third aspect. For example, the BM3 variant may be a variant according to the first aspect.

[0253] In some embodiments of the sixth aspect, the process comprises culturing the recombinant BM3 variant producing microorganism in a culture medium. This can occur as known in the art, e.g. as described in the examples. However, the skilled person is aware of a variety of setups for the cultivation of microorganisms. Suitable culture media are described in the art for the respective expression system and can be easily adapted.

[0254] In some embodiments of the sixth aspect, the BM3 variant is purified prior to incubation with the substrate using a purification technique known in the art, such as immobilized metal affinity chromatography, ion exchange chromatography or size exclusion chromatography. In some other embodiments of the sixth aspect, the BM3 variant remains in a cell suspension when incubated with the substrate, e.g. no separation of BM3 variant and expression system occurs prior to the biotransformation, e.g. whole-cell biotransformation.

[0255] In some embodiments, the process comprises incubating a substrate-containing reaction medium with a BM3 variant (e.g. purified or crude mixture with cells of the expression system). Suitable media and conditions are described in the examples provided herein. However, it is routine for the skilled person to optimize the reaction conditions for a BM3 variant to optimize yields for the reaction product.

[0256] For example, the substrate can be an exogenous substrate. Such an exogenous substrate is added to the biotransformation reaction, e.g. as a purified compound, solution or mixture. The substrate can also be an intermediately formed substrate, i.e. the substrate can be formed in the course of a reaction preceding the C19 hydroxylation. The reaction preceding the C19 hydroxylation reaction may be another biotransformation reaction or a chemical reaction.

[0257] Suitable substrates are steroids or steroid derivatives, in particular those comprising a 1,4-dien-3-one-A-ring or a 4-en-3-one-A-ring. For example ADD or d1-testosterone are suitable substrates for the described BM3 variants. In some preferred embodiments according to the sixth aspect, said steroid or derivative thereof comprises a 1,4-dien-3-one-A-ring and a 19-methyl group. In some preferred embodiments according to the sixth aspect, said steroid or derivative thereof comprises a 4-en-3-one-A-ring and a 19-methyl group.

[0258] Following the biotransformation, the C19 hydroxylation product can be isolated from the reaction medium as described in the art. In the alternative, a secondary product may be isolated from the reaction medium. The isolation may be performed for example by chromatographic techniques such as preparative or analytical HPLC, or by extraction. Extraction of the C19 hydroxylated steroid or steroid derivative or a secondary product thereof may occur as known in the art, e.g. with 4-methyl-2-pentanone (see example 10). Further purification of the C19 hydroxylated steroid or steroid derivative or a secondary product thereof may be performed using chromatographic techniques, e.g. flash chromatography using silica gel or preparative HPLC, or crystallization.

[0259] Analysis of the production of the C19 hydroxylated steroid, steroid derivative or secondary product can occur as known in the art, e.g. by MS- or NMR-methods.

[0260] According to a seventh aspect there is provided a method for obtaining optimized BM3 variants for the C19 hydroxylation of steroids, said method comprising
[0261] [0262] (i) (a) culturing a recombinant microorganism expressing a BM3 variant (test variant) in a culture medium, in the presence of an exogenous or intermediately formed steroid or steroid derivative; or
[0263] (b) incubating a steroid or steroid derivative-containing reaction medium with a BM3 variant (test variant); and
[0264] (ii) Comparing the obtained product yield or titer and/or selectiviy for the C19 hydroxylation product formed by the test variant or a secondary product thereof with the respective value obtained for a parent variant of the test variant capable of catalyzing the C19 hydroxylation of a steroid, and
[0265] (iii) Selecting the test variant as optimized for the C19 hydroxylation of steroids, if the test variant has an improved product yield or titer and/or selectivity compared to the parent variant.

[0266] The description provided for the process according to the fifth and sixth aspect applies mutatis mutandis, in particular with regard to step (i) a and b.

[0267] In a preferred embodiment, the steroid or steroid derivative comprises an 1,4-dien-3-one-A-ring or a 4-en-3-one-A-ring. In a highly preferred embodiment the steroid or steroid derivative is ADD or d1-testosterone. In some preferred embodiments of the seventh aspect, the steroid or derivative thereof comprises a 1,4-dien-3-one-A-ring and a 19-methyl group. In some preferred embodiments of the seventh aspect, said steroid or derivative thereof comprises a 4-en-3-one-A-ring and a 19-methyl group.

[0268] Product yield and selectivity (factor) are calculated as disclosed elsewhere herein. The product yield can be the product yield for the C19 hydroxylated steroid or steroid derivative, or a product derived thereof. Preferably the product yield is the product yield for estradiol or estrone. The selectivity factor can be the selectivity factor for the C19 hydroxylated steroid or steroid derivative.

[0269] Preferably, the daughter variant has the sequence of its parent variant and at least one further mutation. Preferably, the parent variant is a variant according to the first aspect.

### EXAMPLES

[0270] If not stated otherwise, culture media were prepared in demineralized water and sterilized at 121° C. for 20 minutes or sterile filtered. All solutions were prepared with MilliQ water and sterile filtered, unless otherwise described. All preparations were performed under sterile conditions.

[0271] Oxford trace element solution contained FeCl3 × 6 H2O (27 g/L), ZnCl2 (1.31 g/L), CoCl2 × 6 H2O (2.87 g/L), CuCl2 × 2 H2O (1.27 g/L), Boric acid (0.5 g/L), CaCl2 × 2 H2O (1.32 g/L), Na2MoO4 × 2 H2O (2.35 g/L), Hydrochloric acid (37%) (100 mL/L).

[0272] List of abbreviations: Δ...deletion from amino acid; DMSO...Dimethyl sulfoxide; DMF...Dimethylformamide; EDTA...Ethylendiamintetraacetate; × g...times gravity; IPTG... isopropyl β-D-thiogalactopyranoside; LB... Luria-Bertani broth; OD550... optical density at 550 nm; rpm... revolutions per minute; SOC Outgrowth Medium...#B9020S-from BioLabs: 2 % Vegetable Peptone, 0.5% Yeast Extract, 10 mM NaCl, 2.5 mM KCI, 10 mM MgCl2, 10 mM MgSO4, 20 mM Glucose. Pluronic® PE 8100... Pluronic PE types are low-foaming, nonionic surfactants. They are block copolymers in which the central polypropylene glycol group is flanked by two polyethylene glycol groups. PE 8100 conforms to the following structural formula: HO(CH₂CH₂O)ₓ(CH₂C(CH₃)HO)_{y}(CH₂CH₂O)_{z}H.

[0273] PE 8100 is a polypropylene glycol block copolymer with a molar mass of 2300 g/mol and 10 % polypropylene glycol in the molecule.

### Example 1

### Cloning of P450 BM3 (BM3) Variants

[0274] Nucleotide sequences encoding P450-BM3 variants as described herein can be synthesized as known in the art, e.g. as offered by respective service providers such as Eurofins Genomics GmbH (Eurofins Genomics GmbH, Anzinger Str. 7a, 85560 Ebersberg, Germany). In brief, nucleic acid sequences encoding P450-BM3 WT (e.g. SEQ ID No. 59) or other P450-BM3 variants as described herein were cloned into an expression vector based on the vector pETM-11 (EMBL Vector Collection, Germany) or another suitable vector. For a detailed description see section 4.2 “Cloning of cyp102A1 and pETM11-BM3 construction” of Supporting Information of (Acevedo-Rocha 2018). Genetic elements were introduced into the modified pETM-11 vector by means of commonly known methods. For expression of BM3 variants, the expression vector was introduced into Escherichia coli strain BL21 Star™ (DE3) (Invitrogen™, Lifetechnologies) cells, E. coli BL 21 (DE3) cells or E. coli BL 21 Gold (DE3) ΔdkgA :: FRT T7 gdh (the construction is described in (Agudo R 2012)) cells.

### Generation of Enzyme Variants

[0275] Nucleotide substitutions (replacements) were introduced into the nucleic acid parent sequences, e.g. to obtain a T88 exchange into other amino acids on SEQ ID No. 5 as parent. Several Molecular Biological methods can be used to achieve these replacements. A useful method for preparing a mutated nucleic acid according to the invention and the corresponding protein comprises carrying out site-directed mutagenesis on codons encoding one or more amino acids, which are selected in advance. The methods for obtaining these site-directed mutations are well known to the skilled person and widely described in the literature (in particular: Directed Mutagenesis: A Practical Approach, 1991, Edited by M.J. McPHERSON, IRL PRESS), or are methods for which it is possible to employ commercial kits (for example the QUIKCHANGE™ lightening mutagenesis kit from Qiagen or Stratagene). After site-directed mutagenesis, nucleic acids were transformed into the Escherichia coli strain BL21 Star™ (DE3) (Invitrogen™, Lifetechnologies). Replacements within the BM3 gene were generated by first introducing Bsal-sites into a vector backbone with harboring SEQ ID No. 122, yielding an entry vector, and subsequent ligation of insert sequences from a library with different length and properties inframe into the BM3 gene.

[0276] Transformed cells were tested in appropriate biotransformation reactions, in order to determine product yield and selectivity. Appropriate biotransformation reactions are described below, see e.g. Example 2. Sequence verification was performed as known in the art.

[0277] Glycerol stocks of the E. coli cultures transformed with the respective expression plasmids were prepared by adding one volume of 40% glycerol solution to one volume of E. coli culture.

[0278] For isolation of single bacterial colonies, appropriate dilutions of E.coli cultures were plated onto LB-Agar plates containing suitable concentrations of kanamycin and incubated at 37° C. until single colonied were obtained.

### Example 2

### Analysis of P450-BM3 Variants for Estradiol or Estrone Production Cultivation

[0279] For screening purposes E. coli strain BL21 Star™ (DE3) (Invitrogen™, Lifetechnologies) was used as host for expression plasmids (Example 1). For pre-cultures sterilized 2.5-mL 96-well deep-well plates (850301, HJ-Bioanalytik, Erkelenz, Germany) were filled with 490 µL LB-medium (LB Broth Miller, Fisher Bioreagents, BP1426-500) supplemented with kanamycin (Sigma-Aldrich, 50 µg/mL), inoculated with 10 µL of glycerol stocks of the respective variants (that were prepared in 96-well microtiter plates) or alternatively 500 µL LB-medium were inoculated with cell material from Agar plate colonies. Pre-cultures were incubated for 17 hours at 37° C. and 250 rpm in a climo shaker ISF1-X (Kühner AG, Birsfelden, Switzerland).

[0280] Medium for expression cultures contained Tryptone (12 g/L), Yeast extract (24 g/L), Meat Peptone, tryptically digested (2 g/L), KH2PO4 (2.2 g/L), K2HPO4 (9.4 g/L), glycerol (0.4% [v/v]), Riboflavin (0.001 g/L), Thiamine hydrochloride (0.337 g/L) and Oxford trace element solution (250 µL/L). Tryptone, Yeast extract and Meat peptone were prepared as 50 g/L stock solutions, and K-PO4 was prepared as a 50x stock solution. These stock solutions were sterilized at 121° C. for 20 minutes. Riboflavin and Thiamine hydrochloride were freshly prepared as 0.06 g/L and 10 g/L stock solutions and sterile-filtered, respectively. The medium was prepared from the stock solutions and Kanamycin (Kanamycin solution, K0254, Sigma-Aldrich, St. Louis, MO, USA) was added for a final concentration of 50 mg/L.

[0281] For expression cultures sterilized 2.5-mL 96-well deep-well plates (850301, HJ-Bioanalytik, Erkelenz, Germany) were filled with 440 µL expression medium supplemented with kanamycin (50 mg/L); expression cultures were inoculated with 50 µL of pre-cultures. The expression culture plates were incubated at 37° C. and 250 rpm in a climo shaker. After 4 h incubation 10 µL of 30 mM IPTG diluted in expression medium (supplemented with 50 mg/L kanamycin) was added per well to induce enzyme expression (resulting in a final concentration of 0.6 mM IPTG). The expression culture plates were subsequently incubated for 20 hours at 27° C. in a shaking incubator.

[0282] Cells were harvested by centrifugation of the expression cultures for 15 minutes at 4° C. and 2500 × g. The culture supernatant was discarded, and the remaining cell pellets were resuspended in 495 µL of P450 assay buffer (100 mM KPO4-buffer at pH 7.4, 50 g/L glucose, 35 g/L glycerol, 1 mM EDTA) or 250 µL of 2x P450 assay buffer (200 mM KPO4-buffer at pH 7.0, 100 g/L glucose, 70 g/L glycerol, 2 mM EDTA). The deep-well plates were stored at -80° C. until use.

### Biotransformation

[0283] The deep-well plates containing the cell suspensions were thawed at room temperature. The biotransformation reaction was started (i) by addition of 5 µL of Δ1-testosterone or androsta-1,4-diene-3,17-dione (ADD) stock solution (at 5 mg/mL or 10 mg/mL in N,N-Dimethylformamide) to cells resuspended in 495 µL of P450 assay buffer, or (ii) by addition of 250 µL of androsta-1,4-diene-3,17-dione (ADD) stock (at 4000 mg/mL) to 250 µL cell suspension in 2x P450 assay buffer, and incubation occured for 22 h at 27° C. in a shaking incubator. Reactions were stopped by adding 500 µL of Stop solution (containing Acetonitrile, Methanol and Dimethylsulfoxide in a 1:1:1 ratio), and for extraction of steroides incubated on a shaker for 30 min at 20° C. Afterwards the plates were centrifuged for 15 min at 4° C. and 2500× g. From each well 120 µL of the supernatant was transferred to a 96-well filter plate (Corning, 3504) that was subsequently centrifuged for 5 min at 4° C. and 650× g. The filtered samples were stored at -20° C. or directly submitted to HPLC analysis.

### Analytical HPLC Method

[0284] Analytical HPLC was performed with the following setup: Instrument: Agilent Technologies 1290 Infinity; Column: Ascentis Express C18, 50 x 2.1 mm, 2.7 µm; Eluent A: Water (+0.025% or 0.005% Trifluoroacetic acid); Eluent B: Acetonitrile; Flow 1.5 mL/min; Temperature: 45° C.; injection volume: 4 µL, detection at 280 nm. Gradient: 0 - 0.18 min 5% solvent B, 0.18 - 0.4 min 5 - 10% solvent B, 0.4 - 4.6 min 10 - 27% solvent B, 4.6 - 7.0 min 27 - 95% solvent B, 7.01 - 7.5 min 5% solvent B.

[0285] Androsta-1,4-diene-3,17-dione (ADD), Δ1-testosterone, estradiol and estrone (dissolved in N,N-Dimethylformamide) were used as reference substances and as a standard for quantification. Appropriate dilutions were prepared covering the range up to the maximum concentration used in the biotransformation.

[0286] Observed retention times were 4.01 min for Δ1-testosterone, 4.22 min for ADD, 4.37 min for estradiol and 4.86 min for estrone. The concentration of the respective compounds in samples was calculated by comparing the obtained peak areas with those of the standards.

### Example 3

### Conversion of Δ1-Testosterone to Estradiol Using BM3 Variants Based on Parent Type BM3-268 (Seq ID No. 5)

[0287] Variants of BM3-268 (Seq ID No. 5) with mutations in one or two positions were prepared as described in Example 1 and screened for Δ1-testosterone to estradiol conversion. Cultivation, biotransformation and HPLC analysis was performed as described in Example 2. Glycerol stocks were used as inoculum for cultivation, and the initial substrate (Δ1-testosterone) concentration was 50 mg/L.

[0288] Results for estradiol product yield and the selectivity factor for estradiol are shown in FIG. 1 a, b and 2 a, b. For BM3-268 derived variants comprising mutations at position L78, E82 or A87 results for Δ1-testosterone to estradiol conversion are presented in FIG. 1 c.

### Example 4

### Conversion of Δ1-Testosterone to Estradiol Using BM3 Variants Based on BM3-268; M177Y, A184Y (SEQ ID No. 15)

[0289] Variants of the BM3 derivative BM3-268; M177Y, A184Y (Seq ID No. 15) with further mutations in up to six positions (Example 1) were screened for Δ1-testosterone to estradiol conversion. Cultivation, biotransformation and HPLC analysis was performed as described in Example 2. Glycerol stocks were used as inoculum for cultivation, and the initial Δ1-testosterone concentration used in the experiment was 100 mg/L.

[0290] Resulting estradiol product yields and estradiol selectivity factors are shown in FIG. 3 a, b and FIG. 4 a, b, c, d, e, f. For Seq ID No. 15 derived variants comprising mutations at position L78, E82 or A87 results for Δ1-testosterone to estradiol conversion are presented in FIG. 3 c.

### Example 5

### Conversion of Δ1-Testosterone to Estradiol Using BM3-268 (Seq ID No. 5) Variants With Up to Seven Mutations

[0291] Variants of BM3-268 (Seq ID No. 5) with up to seven mutations in different positions (Example 1) were screened for Δ1-testosterone to estradiol conversion. Cultivation, biotransformation and HPLC analysis was performed as described in Example 2. Agar plate colonies were used as inoculum for cultivation, and the initial Δ1-testosterone concentration used in the experiment was 50 mg/L. Results for estradiol yield and the selectivity factor for estradiol are shown in FIG. 5 a and b.

### Example 6

### Conversion of Androsta-1,4-Diene-3,17-Dione (ADD) to Estrone Using BM3 Variants Based on BM3-268; M177Y, A184Y (SEQ ID No. 15)

[0292] Variants of the BM3-268; M177Y, A184Y (Seq ID No. 15) with further mutations in up to six positions (Example 1) were screened for androsta-1,4-diene-3,17-dione (ADD) to estrone conversion. Cultivation, biotransformation and HPLC analysis was performed as described in Example 2. Glycerol stocks were used as inoculum for cultivation, and the initial ADD concentration used in the experiment was 100 mg/L.

[0293] Results for estrone yield and selectivity factor for estrone are shown in FIG. 6 a, b and FIG. 7 a, b, c, d, e, f. For Seq ID No. 15 derived variants comprising mutations at position L78, E82 or A87 results for ADD to estrone conversion are presented in FIG. 6 c.

### Example 7

### Conversion of Androsta-1,4-Diene-3,17-Dione (ADD) to Estrone Using BM3-268 (Seq ID No. 5) Variants With Up To Six Mutations

[0294] Variants of BM3-268 (Seq ID No. 5) with up to six mutations in different positions (Example 1) were screened for androsta-1,4-diene-3,17-dione (ADD) to estrone conversion. Cultivation, biotransformation and HPLC analysis was performed as described in Example 2. Agar plate colonies were used as inoculum for cultivation, and the initial ADD concentration used in the experiment was 100 mg/L. Results for estrone yield and the selectivity factor for estrone are shown in FIG. 8.

### Example 7A

### Conversion of Androsta-1,4-Diene-3,17-Dione (ADD) to Estrone Using BM3 Variants Based on BM3-268; S72G, V78L, A82E, F87A, M177Y, V178P, L181Y, A184Y, L188F (SEQ ID No. 117)

[0295] Variants of the BM3-268; S72G, V78L, A82E, F87A, M177Y, V178P, L181Y, A184Y, L188F (SEQ ID No. 117) with further mutations in one or two positions (Example 1) were screened for androsta-1,4-diene-3,17-dione (ADD) to estrone conversion. Cultivation, biotransformation and HPLC analysis was performed as described in Example 2. Glycerol stocks were used as inoculum for cultivation, and the initial ADD concentration used in the experiment was 2000 mg/L.

[0296] Results for obtained estrone titers and target product ratio for estrone are shown in FIG. 9 and FIG. 10.

### Example 7B

### Conversion of Androsta-1,4-Diene-3,17-Dione (ADD) to Estrone Using BM3-268; S72G, V78L, A82E, F87A, M177Y, V178P, L181Y, A184Y, L188F (SEQ ID No. 117) Variants With Up to Five Mutations

[0297] Variants of BM3-268; S72G, V78L, A82E, F87A, M177Y, V178P, L181Y, A184Y, L188F (SEQ ID No. 117) with up to five mutations in different positions (Example 1) were screened for androsta-1,4-diene-3,17-dione (ADD) to estrone conversion. Cultivation, biotransformation and HPLC analysis was performed as described in Example 2. Agar plate colonies were used as inoculum for cultivation, and the initial ADD concentration used in the experiment was 2000 mg/L. Results for estrone titer and the target product ratio for estrone are shown in FIG. 11.

### Example 7C

### Conversion of Androsta-1,4-Diene-3,17-Dione (ADD) to Estrone Using BM3-268; S72G, V78L, A82E, F87A, T146F, M177Y, V178W, L181Y, A184Y (SEQ ID No. 118) Variants With Three Mutations

[0298] Variant G457S, I458G, A477N of BM3-268; S72G, V78L, A82E, F87A, T146F, M177Y, V178W, L181Y, A184Y (SEQ ID No. 118) (see Example 1) was screened for androsta-1,4-diene-3,17-dione (ADD) to estrone conversion. Cultivation, biotransformation and HPLC analysis was performed as described in Example 2. Glycerol stocks were used as inoculum for cultivation, and the initial ADD concentration used in the experiment was 2000 mg/L. Results for the obtained estrone titer and target product ratio (TPR) are listed in Table E7C.

[0299] Table E7C: Obtained estrone titers and target product ratio (TPR) with BM3 variants Seq ID No. 118 and 119.

| BM3-268 variant | SEQ ID No. | Estrone titer (mean) (mg/L) | Estrone titer (standard deviation) (mg/L) | TPR Estrone (mean) | TPR Estrone (standard deviation) |
|---|---|---|---|---|---|
| S72G, T146F, M177Y, V178W, L181Y, A184Y | 118 | 209.22 | 21.26 | 0.732 | 0.169 |
| S72G, T146F, M177Y, V178W, L181Y, A184Y, G457S, I458G, A477N | 119 | 253.32 | 26.78 | 0.784 | 0.146 |

### Example 7D

### Conversion of Androsta-1,4-Diene-3,17-Dione (ADD) to Estrone Using BM3-268; S72G, T146F, M177Y, V178W, L181Y, A184Y, G457S, I458G, A477N (SEQ ID No. 119) With Exchanges of the Amino Acid Sequence Between Positions 458 and 477 by Inserts With Varying Length and Properties

[0300] Variants of BM3-268; S72G, T146F, M177Y, V178W, L181Y, A184Y, G457S, I458G, A477N (SEQ ID No. 119) with amino acid sequence exchanges between positions 458 and 477 (Example 1) were screened for androsta-1,4-diene-3,17-dione (ADD) to estrone conversion. Cultivation, biotransformation and HPLC analysis was performed as described in Example 2. Glycerol stocks were used as inoculum for cultivation, and the initial ADD concentration used in the experiment was 2000 mg/L.

[0301] Results for the obtained estrone titers and target product ratios (TPR) are listed in Table E7D. Only those variants are listed where - relative to the parent type - the insert (“linker”) improved (i) product yield as determined by titer and/or (ii) selectivity as determined by TPR.

[0302] Table E7D: Obtained estrone titer and target product ratio (TPR) with BM3 variants with amino acid sequence exchanges between positions 458 and 477 in BM3-268; S72G, T146F, M177Y, V178W, L181Y, A184Y, G457S, I458G, A477N (SEQ ID No. 119)

| Linker/insert Variant | Estron-Titer (mq/L) | Estrone titer ratio relative to SEQ ID No. 119 | TPR Estrone | TPR (variant to SEQ ID No. 119) |
|---|---|---|---|---|
| GKHIIQGPMYDVSGTAPVNVTN | 265.68 | 1.05 | 0.737 | 1.016 |
| LRASVSAIQQTTKQIYDDQSLVNV | 282.72 | 1.12 | 0.718 | 0.989 |
| AASKPEFIKPEDVSAEVVEKEYQVQL | 254.76 | 1.01 | 0.722 | 0.996 |
| AKKPLNTEGVMKSRSN | 254.20 | 1.01 | 0.734 | 1.012 |
| SAAAATPAVRTVPQYKYAAGVRNPQQHL NAQPQVTMQQPAVHVQGQEPL | 296.28 | 1.17 | 0.745 | 1.028 |
| TVHFESFGATNTNARENTPF | 265.56 | 1.05 | 0.951 | 1.000 |
| ENPGVTQLNRLAAHPPFAS | 260.11 | 1.03 | 0.714 | 0.985 |
| VKMVRVQAIEKNRYRA | 377.77 | 1.49 | 0.968 | 1.018 |
| VREALLRRQRAFRELPG | 327.64 | 1.29 | 0.958 | 1.008 |
| IRPRAIGGSKPRVA | 260.09 | 1.03 | 0.723 | 0.997 |
| DETYVPKEFNAETF | 256.58 | 1.02 | 0.751 | 1.036 |
| WQYTAATATPTIGHV | 257.69 | 1.02 | 0.814 | 1.122 |
| ARKLLSPEVAND | 260.90 | 1.03 | 0.750 | 1.034 |
| VQTPGHANQSMMPQFIMPANNQFSAQ | 300.62 | 1.19 | 0.802 | 1.106 |
| GGGGSGGGGSGGGGSGGGGS | 277.31 | 1.10 | 0.839 | 1.157 |
| GGGGSGGGGSGGGGS | 272.08 | 1.08 | 0.769 | 1.060 |
| APAPAPAPAPAPAPAP | 253.89 | 1.01 | 0.724 | 0.999 |
| PSTEQSAKKVRKKAEN | 346.70 | 1.37 | 0.964 | 1.014 |
| PSPSTEQSKVRKKAEN | 290.90 | 1.15 | 0.965 | 1.015 |
| PSPSTEQSAKKVR | 259.95 | 1.03 | 0.829 | 1.143 |
| TKLPEAQQRVGGCFLNLMPQMKTLYLTYC ANHPSAVNVL | 135.79 | 0.54 | 0.975 | 1.025 |
| GNVPELPDTTEHSRTDL | 232.63 | 0.92 | 0.741 | 1.022 |
| TARKGKGAFCNGQKLQV | 237.15 | 0.94 | 0.961 | 1.011 |
| PSDNVDAQLYNGFFSDAD | 225.89 | 0.89 | 0.961 | 1.010 |
| AMSLYLAGEISLLILDEPT | 94.19 | 0.37 | 1.000 | 1.052 |
| GCAWYELMPAETTVRLRA | 239.61 | 0.95 | 0.795 | 1.096 |
| LSLEVAEEIARLEAEV | 250.97 | 1.00 | 0.740 | 1.021 |
| ASSYTAPQPGLG | 169.78 | 0.67 | 1.000 | 1.052 |
| IPVPTRDLEKPF | 189.87 | 0.75 | 0.981 | 1.032 |
| VIGYMPIPVGVA | 233.26 | 0.92 | 0.756 | 1.042 |
| RGRWMARLARM | 153.66 | 0.61 | 1.000 | 1.052 |
| FLMKLINRPII | 162.51 | 0.64 | 0.992 | 1.044 |
| LSPDEAP | 207.67 | 0.82 | 1.000 | 1.052 |
| VEPPDL | 193.74 | 0.76 | 1.000 | 1.052 |
| FITPII | 191.08 | 0.75 | 0.960 | 1.010 |
| LRKMRTGKP | 188.21 | 0.74 | 1.000 | 1.052 |
| SNSTMKKHGR | 244.12 | 0.96 | 0.808 | 1.114 |
| YLSITFL | 112.07 | 0.44 | 1.000 | 1.052 |
| AAAEKNVPLY | 216.16 | 0.85 | 0.977 | 1.028 |
| SEFEDPLV | 199.76 | 0.79 | 0.964 | 1.014 |
| KRSPW | 198.09 | 0.78 | 1.000 | 1.052 |
| NASCT | 176.89 | 0.70 | 0.955 | 1.005 |
| IQRKK | 197.47 | 0.78 | 1.000 | 1.052 |
| EDSGF | 222.51 | 0.88 | 0.969 | 1.019 |
| FVGVL | 188.23 | 0.74 | 1.000 | 1.052 |
| GGGGSGGGGS | 241.84 | 0.95 | 0.804 | 1.109 |
| GGGGS | 205.94 | 0.81 | 0.966 | 1.016 |
| PAPAP | 128.37 | 0.51 | 0.952 | 1.001 |
| PSPSTEVRKKAEN | 249.06 | 0.99 | 0.748 | 1.031 |
| PSPSTKKAEN | 212.52 | 0.84 | 0.994 | 1.046 |
| PEN | 207.56 | 0.82 | 1.000 | 1.052 |

### Example 7E

### BM3 Protein Level of BM3 Variants Based on the Wild Type (SEQ ID No. 1) With Up To Eight Amnio Acid Exchanges

[0303] Variants of wild type BM3 (SEQ ID No. 1) with up to eight mutations (Example 1) in different positions were screened for BM3 protein level. Cultivation of cells was carried out as described in Example 2. Cellular protein levels were analyzed on PAGE gel (NuPAGE™ 4 to 12%, Bis-Tris, 1.0 mm, Mini Protein Gel, 15-well; Thermo Fisher Scientific). Expression cultures were adjusted to an OD₆₀₀ₙₘ of 0.5, and one volume of a 2-fold blend of NuPAGE® LDS Sample Buffer (4X) and NuPAGE® Sample Reducing Agent (10X) (both Thermo Fisher Scientific) were added. Samples were denatured for 5 minutes at 99° C. in a Thermocycler. Subsequently, 10 µL of denatured samples were loaded on the gel, and electrophoresis was carried out at for 60 minutes at 180 Volts in NuPAGE® MOPS SDS Running Buffer (Thermo Fisher Scientific). After electrophoresis the gels were stained using SimplyBlue™ SafeStain (Thermo Fisher Scientific), and a digital image was taken. Quantification of protein bands was carried out using the software package ImageJ (ImageJ version 1.53e, National Institutes of Health, Bethesda, MD, USA). The gel image was converted to 8-bit grey scale and a background subtraction was performed using the setting ‘light background’ at a rolling ball radius of 50. Areas in the gel profile were calculated for each lane for the BM3 protein peak and for the sum of all peaks (total protein). Based on the area values of BM3 protein and total protein the ratio of BM3 to total protein was calculated for each sample, and those values were compared to the wild type control samples ((area BM3/ area total protein for variant)/ (area BM3/ area total protein for wild type)). The results for the BM3 protein level relative to the BM3 wild type are listed in Table E7E.

[0304] Table E7E: BM3 protein levels of BM3 variants with up to eight mutations relative to the wild type (SEQ ID No. 1)

| Mutations | BM3 area/ total area | BM3 area/ total area Variant-to-WT |
|---|---|---|
| C62L, A117P, G157L, N319E | 0.498 | 1.255 |
| C62L, G227P, N319E, K391L | 0.399 | 1.048 |
| C62L, S106A, A117P, A295D, V371P | 0.400 | 1.053 |
| C62L, S106A, A117P, G227P, P243E | 0.448 | 1.129 |
| C62L, S106A, Q128E, G157L, P243E, A295D, G368E, K391L | 0.431 | 1.133 |
| C62L, S106A, Q128E, G227P, K391L | 0.400 | 1.052 |
| C62L, S106A, Q128E, G227P, Q288E, K391L | 0.407 | 1.070 |
| C62L, S106A, Q128E, T152I, G227P, P243E, H408L | 0.498 | 1.310 |
| Q110E, Q128E, Q288E, N319E | 0.415 | 1.046 |
| Q128E, H285E, Q288E, N319E | 0.401 | 1.011 |
| S106A, A117P, Q128E, T152I, G227P, N319E, V371P, N395F | 0.390 | 1.025 |
| S106A, G227P, H285E, V371P, K391L, H408L | 0.415 | 1.045 |
| S106A, H285E, Q288E | 0.539 | 1.358 |
| S106A, Q110E, G227P, H285E, K391L | 0.421 | 1.108 |
| S106A, Q110E, G227P, N319E, K391L, N395F | 0.583 | 1.469 |
| S106A, Q110E, Q128E, G227P, Q288E, N319E, K391L | 0.424 | 1.069 |
| S106A, Q128E | 0.400 | 1.008 |
| S106A, Q128E, H285E | 0.523 | 1.317 |

### Example 8

### Method for Screening P450-Bm3 Variants for the C19 Hydroxylation Of (17beta)-17-Hydroxyandrosta-1,4-Dien-3-One (Delta-1-Testosterone) Media

[0305] Tryptone (10 g/L), sodium chloride (10 g/L) and yeast extract (5 g/L) in demineralized water. The medium was sterilized at 121° C. for 20 minutes. Afterwards kanamycin (50 mg/L) was added.

### Preculture

[0306] Each well of a 96 deep well plate contained 0.25 ml of the medium which was inoculated with the E. coli strains (2 µL) containing the P450-BM3 variants from glycerol stocks. The plate was shaken at 37° C. and 800 rpm for 17 hours.

### Main Culture

[0307] Each well of a 96 deep well plate contained 1.5 ml of the medium which was inoculated with 50 µL from the preculture. The cultures were shaken at 37° C. and 800 rpm for 3 hours. Then the temperature was decreased to 27° C. within 1 hour and IPTG (1 mM) in demineralized water was added to start the protein expression. After 4 hours of expression, the plates were harvested by centrifugation, the supernatant was discarded, the pellets were resuspended in 500 µL reaction buffer (KH2PO4 (4 g/L), K2HPO4 (12.3 g/L), glycerol (4% (v/v)), glucose (5% (w/v)), EDTA (0.5 mM)), frozen in liquid nitrogen and stored at-80° C.

### Biotransformation

[0308] The plates were thawed and the reaction was started by addition of 5 µL of steroid stock solution of (17beta)-17-hydroxyandrosta-1,4-dien-3-one (12.5 µg dissolved in 5 µL of DMF) and plates were shaken for 22 h at 700 rpm and 27° C. while covered with lids. The plates were frozen in liquid nitrogen and stored at -80° C. The thawed samples were prepared for HPLC screening by adding 500 µL mixture of acetonitrile / methanol / DMSO 1:1:1 (HPLC grade). The plates were shaken and centrifuged and 200 µl of the supernatant was transferred to an analytics plate. The plate was covered with a silicone sealing mat and submitted to HPLC analysis.

### HPLC Analysis

### Analytical Chiral HPLC Method

[0309] Instrument: Waters Acquity UPLCMS SingleQuad; Column: Thermo Accucore C30 2.6 µm, 50x2.1 mm; Eluent A: water + 0.05 vol % formic acid, eluent B: acetonitrile + 0.05 vol % formic acid; Gradient: 0.0-2.0 min 5-30% B, 2.0-5.0 min 85% B; injection volume 4 µL; flow 0.9 mL/min; temperature: 45° C.; DAD scan: 248-280 nm.

TABLE E1

HPLC retention times

| Substance | Retention Time |
|---|---|
| Delta-1-testosterone | 2.40 |
| Estradiol (Example 10) | 2.55 |
| (15beta-OH)-delta-1-testosterone (Example 12) | 1.39 |
| (1alpha,2alpha-epoxy)-testosterone (Example 11) | 2.46 |
| (1alpha,2alpha-epoxy-15beta-OH)-testosterone (Example 15) | 1.35 |
| (6beta-OH)-delta-1-testosterone (Example 16) | 1.50 |
| (1alpha,2alpha-epoxy-19-OH)-testosterone (Example 14) | 1.56 |
| (15beta-OH)-estradiol (Example 13) | 1.69 |

### Results

[0310] After testing hundreds of P450-BM3 variants, only few mutants allowed for the C19-hydroxylation of delta-1-testosterone leading to estradiol as final product:

TABLE E2

Estradiol product yield in % for some P450 BM3 variants

| | mutations | substrate | product | Screening yield (%) |
|---|---|---|---|---|
| BM3 254 | V78Y, A82E, F87A | delta-1-testosterone | estradiol | 1.9 |
| BM3 261 | V78M, A82E, F87A | delta-1-testosterone | estradiol | 6 |
| BM3 263 | V78I, A82E, F87A | delta-1-testosterone | estradiol | 4.8 |
| BM3 268 | V78L, A82E, F87A | delta-1-testosterone | estradiol | 6.6 |

[0311] In a subsequent screening experiment of four BM3 variants the following screening yields were found for the following (side) products:

TABLE E3

Products formed with delta-1-testosterone as substrate for some P450 BM3 variants

| Variant | Substrate | Screening yield (%) | | | | | |
|---|---|---|---|---|---|---|---|
| | | Example 10 | Example 12 | Example 11 | Example 15 | Example 16 | Example 14 |
| BM3 254 | delta-1-testosterone | 2.5 | 10.3 | 8.6 | 3.4 | 2.2 | - |
| BM3 261 | delta-1-testosterone | 6.3 | 15 | 13.2 | 9.3 | 0.4 | 10.1 |
| BM3 263 | delta-1-testosterone | 3 | 21.6 | 1.6 | 11.8 | 1.5 | 6.5 |
| BM3 268 | delta-1-testosterone | 6.7 | 26.3 | 5.4 | 7.8 | 4.1 | 10.3 |

### Example 9

### Method for Screening P450-Bm3 Variants for the C19 Hydroxylation Of (17beta)-17-Hydroxyandrost-4-En-3-One (Testosterone) as Substrate

[0312] Media, preculture and main culture were prepared as decribed for delta-1-testosterone (Example 8).

### HPLC Analysis

### Analytical Chiral HPLC Method

[0313] Instrument: Waters Acquity UPLCMS SingleQuad; Column: Ascentis Express C18 2.7 µm, 50×2.1 mm; Eluent A: water + 0.05 vol % formic acid, eluent B: acetonitrile + 0.05 vol % formic acid; Gradient: 0.0-3.0 min 5-30% B, 3.0-5.0 95% B, 5.0-5.5 5% B; injection volume 4 µL; flow 0.9 mL/min; temperature: 45° C.; DAD scan: 244 nm.

TABLE E4

HPLC retention times

| Substance | Retention Time |
|---|---|
| Testosterone | 3.45 |
| (19-OH)-testosterone (Example 17) | 2.19 |
| (2beta,19-di-OH)-testosterone (Example 20) | 1.63 |
| (15beta,19-di-OH)-testosterone (Example 18) | 1.23 |
| (2beta,15beta-di-OH)-testosterone (Example 19) | 1.17 |
| (15beta-OH)-testosterone | 1.95 |
| (2beta-OH)-testosterone | 2.92 |

### Results

[0314] After testing hundreds of P450-BM3 variants, only few variants allowed for the C19-hydroxylation of testosterone:

TABLE E5

Products formed with testosterone as substrate for some P450 BM3 variants

| Variant | Substrate | Screening yield (%) | | | | | |
|---|---|---|---|---|---|---|---|
| | | Example 17 | Example 20 | Example 18 | Example 19 | (2beta-OH)-testosterone | (15beta-OH)-testosterone |
| BM3 254 | testosterone | 8 | 4 | | | 29 | 5 |
| BM3 261 | testosterone | | 23 | | 13 | 31 | 17 |
| BM3 263 | testosterone | | 11 | 4 | 5 | 35 | 16 |
| BM3 268 | testosterone | | 39 | 5 | 7 | 9 | 20 |

### Example 10

[0315] (17beta)-estra-1 (10),2,4-triene-3,17-diol

[chemical structure]

### Expression System

[0316] Expression system E. coli BL 21(DE3) pETM11 with BM3-268 was provided by M. T. Reetz and is described in (Kille Sabrina 2011) (DOI:10.1038/NCHEM.1113). The respective protein and gene sequence such as pETM11-BM3-268 is given in SEQ ID No. 5 and 63, respectively.

### Cultivation

[0317] Preculture medium comprised tryptone (10 g/L), sodium chloride (10 g/L) and yeast extract (5 g/L) in demineralized water. The medium was sterilized before kanamycin (50 mg/L) was added. One preculture (100 mL) was inoculated with the strain E. coli BL 21 (DE3) pETM11-BM3-268 (SEQ ID No.5) (50 µL) containing the desired plasmids and was shaken at 37° C. and 165 rpm for 16 hours. This preculture (100 mL) was used to inoculate one 5 L steel fermenter. The cultivation medium was prepared in the fermenter. Tryptone (20 g/L), sodium chloride (20 g/L), yeast extract (10 g/L) and Pluronic® PE 8100 (0.5 mL) were dissolved in demineralized water (4.0 L) and sterilized for 30 minutes at 121° C. in the fermenter. Afterwards kanamycin (0.25 g) in demineralized water (10 mL) was added. After the inoculation of the fermenter (16 hours old preculture), the inoculated culture was stirred at 500 rpm at 37° C. with an aeration rate of 2.5 L/min and an oxygen partial pressure of 30% regulated by the stirring rate of up to 1500 rpm. After 3 hours an aqueous glucose solution (25 %, 40 g/h) was added. After 4 hours and 25 minutes an OD550 of 16.16 was reached, the temperature was decreased to 28° C. within 10 minutes and IPTG (1.19 g) in demineralized water (50 mL) was added to start the protein expression. After additional 8 hours and 35 minutes the cells (124.6 g) were harvested by centrifugation, suspended in buffer (125 mL; KH2PO4 (4 g/L), K2HPO4 (12.3 g/L), glycerol (4% (v/v)), glucose (5% (w/v)), EDTA (0.5 mM)), frozen in liquid nitrogen and stored at -80° C. until further use in aliquots of 4 × 45 mL, 1 × 35 mL und 10 × 1 mL.

### Biotransformation

[0318] To a 5 L steel fermenter which contained KH2PO4 (15 g), K2HPO4 (46.15 g), Pluronic® PE 8100 (0.5 mL), demineralized water (3.8 L), aqueous glucose solution (50%, 375 mL) and aqueous EDTA solution (0.5 M, 3.75 mL) (17beta)-17-hydroxyandrosta-1,4-dien-3-one (500 mg, 1.75 mmol) dissolved in DMF (10 mL) was added and the mixture was stirred at 140 rpm at 27° C. with an aeration rate of 2.0 L/min. Cells in buffer (215 mL) were added and the biotransformation was stirred at an oxygen partial pressure of 50 % regulated by the stirring rate of up to 800 rpm. The pH value was maintained at pH 7.4 by addition of an aqueous solution of sodium hydroxide (16%). After 26 hours and 5 minutes the biotransformation was extracted with 4-methyl-2-pentanone. The organic layer was concentrated to give a crude oil (4.98 g) which was slurried with methanol, filtered and concentrated to give an oil (4 g). The crude product was further purified by flash chromatography using silica gel (dichloromethane/acetone gradient) and by preparative HPLC to give the title compound (4.3 mg, 0.8% yield).

### Preparative Chiral HPLC Method

[0319] Instrument: Waters Autopurificationsystem; Column: Waters XBrigde C18 5 µ 100×30 mm; Eluent A: water + 0.2 vol-% aqueous ammonia (32%), Eluent B: acetonitrile; gradient: 0.00-0.50 min 17% B (40-70 mL/min), 0.51-5.50 min 34-44 % B (70 mL/min), DAD scan: 210-400 nm.

### Analytical Chiral HPLC Method

[0320] Instrument: Waters Acquity UPLCMS SingleQuad; Column: Acquity UPLC BEH C18 1.7 µm, 50×2.1 mm; eluent A: water + 0.2 vol % aqueous ammonia (32%), eluent B: acetonitrile; gradient: 0-1.6 min 1-99% B, 1.6-2.0 min 99% B; flow 0.8 mL/min; temperature: 60° C.; DAD scan: 210-400 nm.

[0321] LC-MS: Rₜ = 1.01 min; MS (ESIneg): m/z = 271 [M-H]⁻ ¹H-NMR (400 MHz, CHLOROFORM-d) δ [ppm]: 0.000 (1.83), 0.710 (4.29), 1.102 (0.18), 1.113 (0.30), 1.132 (0.31), 1.141 (0.29), 1.160 (0.32), 1.185 (0.85), 1.213 (0.54), 1.224 (0.54), 1.243 (0.60), 1.255 (0.59), 1.273 (0.57), 1.286 (0.46), 1.303 (0.52), 1.317 (0.44), 1.329 (0.32), 1.348 (0.47), 1.355 (0.45), 1.375 (0.54), 1.398 (0.55), 1.407 (0.56), 1.429 (0.57), 1.438 (0.51), 1.460 (0.41), 1.471 (0.41), 1.509 (0.63), 1.590 (0.24), 1.599 (0.21), 1.616 (0.31), 1.621 (0.29), 1.633 (0.23), 1.640 (0.26), 1.775 (0.23), 1.783 (0.23), 1.790 (0.24), 1.807 (0.22), 1.814 (0.24), 1.821 (0.20), 1.851 (0.23), 1.859 (0.34), 1.867 (0.24), 1.882 (0.22), 1.890 (0.31), 1.898 (0.20), 2.030 (0.22), 2.043 (0.24), 2.053 (0.23), 2.063 (0.26), 2.077 (0.30), 2.100 (0.32), 2.211 (0.25), 2.218 (0.25), 2.244 (0.24), 2.252 (0.22), 2.554 (16.00), 2.736 (0.53), 2.749 (0.54), 2.776 (0.22), 3.642 (0.29), 3.664 (0.50), 3.685 (0.27), 6.498 (0.70), 6.546 (0.36), 6.552 (0.31), 6.567 (0.39), 6.574 (0.34), 7.076 (0.58), 7.097 (0.53).

### Example 11

[0322] (1alpha,2alpha,17beta)-17-hydroxy-1,2-epoxyandrost-4-en-3-one

[chemical structure]

[0323] For the preparation of the title compound see preparation of Example 10. The crude product was further purified by flash chromatography using silica gel (dichloromethane/acetone gradient) and by preparative HPLC to give the title compound (13 mg).

### Preparative Chiral HPLC Method

[0324] Instrument: Waters Autopurification system; Column: Waters XBrigde C18 5 µ 100×30 mm; Eluent A: Water + 0.1 Vol-% Formic acid (99 %), Eluent B: Acetonitrile; Gradient: 0.00-0.50 min 16% B (25-70 mL/min), 0.51-5.50 min 33-48% B (70 mL/min), DAD scan: 210-400 nm.

### Analytical Chiral HPLC Method

[0325] Instrument: Waters Acquity UPLCMS SingleQuad; Column: Acquity UPLC BEH C18 1.7 µm, 50×2.1 mm; Eluent A: Water + 0.1 Vol-% Formic acid (99 %), Eluent B: Acetonitrile; Gradient: 0-1.6 min 1-99% B, 1.6-2.0 min 99% B; Flow: 0.8 mL/min; Temperature: 60° C.; DAD scan: 210-400 nm.

[0326] Analytical Chiral HPLC: Rₜ = 2.04 min.

[0327] ¹H-NMR (600 MHz, Pyridine-d5): δ [ppm]: 0.77 - 0.91 (m, 2H), 0.98 - 1.05 (m, 1H), 0.99 (s, 3H), 1.11 (td, 1H), 1.23 - 1.32 (m, 1H), 1.34 (s, 3H), 1.43 - 1.53 (m, 2H), 1.55 - 1.67 (m, 2H), 1.73 -1.81 (m, 2H), 2.01 - 2.14 (m, 3H), 2.20 (td, 1H), 3.63 (dd, 1H), 3.74 (d, 1H), 3.89 (td, 1H), 5.91 -5.93 (m, 1H), 6.18 (d, 1H).

### Example 12

[0328] (15beta,17beta)-15,17-dihydroxyandrosta-1,4-dien-3-one

[chemical structure]

[0329] For the preparation of the title compound see preparation of Example 10. The crude product was further purified by flash chromatography using silica gel (dichloromethane/acetone gradient) and by preparative HPLC to give the title compound (78 mg).

[0330] Analytical HPLC: Rₜ = 0.74 min; MS (ESIpos): m/z = 303 [M+H]⁺

[0331] ¹H-NMR (600 MHz, CDCl3) δ [ppm]: 0.82 (dd, 1H), 1.05 - 1.16 (m, 3H), 1.11 (s, 3H), 1.28 (s, 3H), 1.58 - 1.65 (m, 1H), 1.71 (qd, 1H), 1.75 - 1.80 (m, 1H), 1.86 (dt, 1H), 2.09 (qd, 1H), 2.20 -2.29 (m, 1H), 2.37 - 2.42 (m, 1H), 2.55 (tdd, 1H), 2.63 (ddd, 1H), 3.58 (t, 1H), 4.21 (ddd, 1H), 6.09 (s, 1H), 6.24 (dd, 1H), 7.08 (d, 1H).

### Example 13

[0332] (15beta,17beta)-estra-1(10),2,4-triene-3,15,17-triol

[chemical structure]

### Cultivation

[0333] Medium of the preculture with tryptone (16 g/L), sodium chloride (10 g/L) and yeast extract (10 g/L) in demineralized water was adjusted to pH 7.3 with sodium hydroxide solution (16% in water), and sterilized at 121° C. for 20 minutes. Afterwards kanamycin (50 mg/L) was added.

[0334] One preculture (100 mL each) was inoculated with the Escherichia coli strain BL 21 Gold (DE3) ΔdkgA :: FRT T7 gdh (50 µL) expressing BM3-268; F77L and was shaken at 37° C. and 165 rpm for 16 hours. These precultures (100 mL) were used to inoculate one 10 L steel fermenter. The cultivation media was prepared in the fermenters. Tryptone (12 g/L), yeast extract (24 g/L), predigested beef extract (2 g/L), KH2PO4 (2.2 g/L), K2HPO4 (9.4 g/L) and glycerol (87%, 4.6 g/L) were dissolved in demineralized water (9.2 L) and sterilized for 20 minutes at 121° C. in the fermenter. Afterwards kanamycin (0.5 g) in water (20 mL), riboflavin (10 mg) in water (20 mL), thiamine hydrochloride (3.37 g) in water (10 mL) and Oxford trace metal solution (2.5 mL) were added. After the inoculation with the 17 hours old preculture, the inoculated culture was stirred at 315 rpm at 37° C. with an aeration rate of 3.3 L/min partial pressure at pH 6.6 which was regulated by addition of aqueous sodium hydroxide solution (16%) or aqueous phosphoric acid solution (16%). After 2 hours an OD550 of 0.92 was reached, the temperature was decreased to 27° C. within 15 minutes and IPTG (2.38 g) in demineralized water (40 mL) and aminolevulinic acid (838 mg) in demineralized water (40 mL) were added to start the protein expression. After 12 hours the aqueous phosphoric acid solution (16%) was substituted for an aqueous glucose solution (50%) for pH regulation. After additional 24 hours the cells were harvested by centrifugation (96.86 g), suspended in buffer (97 mL; KH2PO4 (4 g/L), K2HPO4 (12.3 g/L), glycerol (4% (v/v)), glucose (5% (w/v)), EDTA (0.5 mM)), frozen in liquid nitrogen and stored at -80° C. until further use in aliquots of 2 ×40 mL, 1 ×80 mL und 5 × 1 mL.

### Biotransformation 1

[0335] To one 1 L Biostat Q fermenter which contained KH2PO4 (4 g), K2HPO4 (12.3 g), Pluronic® PE 8100 (0.1 mL), demineralized water (930 mL), aqueous glucose solution (50%, 20 mL) and aqueous EDTA solution (0.5 M, 1 mL) (17beta)-17-hydroxyandrosta-1,4-dien-3-one (50 mg, 174.5 µmol) dissolved in DMF (4 mL) was added and the mixture was stirred at 300 rpm at 27° C. with an aeration rate of 0.5 L/min. The pH value was maintained at pH 7.4. Cells in buffer (20 mL) were added and the biotransformation was maintained at an oxygen partial pressure of 50 % by varying the stirring rate to up to 1200 rpm. After 24 hours and 40 minutes the biotransformation was frozen and stored at -20° C.

### Biotransformation 2

[0336] To one 1 L Biostat Q fermenter which contained KH2PO4 (4 g), K2HPO4 (12.3 g), Pluronic® PE 8100 (0.1 mL), demineralized water (930 mL), aqueous glucose solution (50%, 20 mL) and aqueous EDTA solution (0.5 M, 1 mL) (17beta)-17-hydroxyandrosta-1,4-dien-3-one (50 mg, 174,5 µmol) dissolved in DMF (4 mL) was added and the mixture was stirred at 300 rpm at 27° C. with an aeration rate of 0.5 L/min. The pH value was maintained at pH 7.4. Cells in buffer (40 mL) were added and the biotransformation was maintained at an oxygen partial pressure of 50 % by varying the stirring rate to up to 1200 rpm. After 24 hours and 40 minutes the biotransformation was harvested, frozen and stored at -20° C.

### Biotransformation 3 + 4

[0337] To two 1 L Biostat Q fermenter which contained KH2PO4 (4 g), K2HPO4 (12.3 g), Pluronic® PE 8100 (0.1 mL), demineralized water (930 mL), aqueous glucose solution (50%, 20 mL) and aqueous EDTA solution (0.5 M, 1 mL) (17beta)-17-hydroxyandrosta-1,4-dien-3-one (50 mg, 174,5 µmol) dissolved in DMF (4 mL) was added and the mixture was stirred at 300 rpm at 27° C. with an aeration rate of 0.5 L/min. The pH value was maintained at pH 7.4. Cells in buffer (40 mL) were added and the biotransformation was maintained at an oxygen partial pressure of 50% by varying the stirring rate to up to 1200 rpm. After 5 hours and 20 minutes the culture was harvested, frozen and stored at -20° C.

[0338] The harvested four biotransformations were thawed, combined and extracted with 4-methyl-2-pentanone.

[0339] The organic phases were concentrated to give a crude oil (1.69 g) which was slurried with methanol and was filtered and concentrated to give an oil (1.04 g). The crude product was further purified by flash chromatography using silica gel (dichloromethane/ethanol gradient) and by preparative HPLC to give the title compound (13.0 mg).

### Preparative Chiral HPLC Method

[0340] Instrument: Waters Autopurificationsystem; Column: Waters XBrigde C18 5 µ 50×50 mm; Eluent A: Water + 0.1 Vol-% Formic acid (99%), Eluent B: Acetonitrile; Gradient: 0.00-0.50 min 5% B (50-100 mL/min), 0.51-8.00 min 5 - 35% B (100 mL/min), DAD scan: 210-400 nm.

### Analytical Chiral HPLC Method

[0341] Instrument: Waters Acquity UPLCMS SingleQuad; Column: Acquity UPLC BEH C18 1.7 µm, 50×2.1 mm; Eluent A: Water + 0.1 Vol-% Formic acid (99%), Eluent B: Acetonitrile; Gradient: 0-1.6 min 1-99% B, 1.6-2.0 min 99% B; Flow 0.8 mL/min; Temperature: 60° C.; DAD scan: 210-400 nm.

[0342] Analytical Chiral HPLC: Rₜ = 0.78 min.

[0343] ¹H-NMR (600 MHz, Pyridine-d5): δ [ppm]: 1.08 (dd, 1H), 1.37 (td, 1H), 1.49 (qd, 1H), 1.61 (s, 3H), 1.65 - 1.74 (m, 1H), 2.17 - 2.24 (m, 2H), 2.28 (ddd, 1H), 2.32 - 2.39 (m, 2H), 2.49 - 2.56 (m, 1H), 2.81 - 2.89 (m, 2H), 2.94 - 3.01 (m, 1H), 3.96 (td, 1H), 4.55 (s, 1H), 5.85 (d, 1H), 6.25 (d, 1H), 7.02 (d, 1H), 7.12 (dd, 1H), 7.38 (d, 1H), 11.16 (s, 1H).

### Example 14

[0344] (1alpha,2alpha,17beta)-17,19-dihydroxy-1,2-epoxyandrost-4-en-3-one

[chemical structure]

[0345] For the preparation of the title compound see Example 13. The crude product (1.04 g) was further purified by flash chromatography using silica gel (dichloromethane/ethanol gradient) and by preparative HPLC to give the title compound (7.4 mg).

### Preparative Chiral HPLC Method

[0346] Instrument: Waters Autopurificationsystem; Column: Waters XBrigde C18 5 µ 50×50 mm; Eluent A: Water + 0.1 Vol-% Formic acid (99%), Eluent B: Acetonitrile; Gradient: 0.00-0.50 min 5% B (50-100 mL/min), 0.51-8.00 min 5 - 35% B (100 mL/min), DAD scan: 210-400 nm.

### Analytical Chiral HPLC Method

[0347] Instrument: Waters Acquity UPLCMS SingleQuad; Column: Acquity UPLC BEH C18 1.7 µm, 50×2.1 mm; Eluent A: Water + 0.1 Vol-% Formic acid (99%), Eluent B: Acetonitrile; Gradient: 0-1.6 min 1-99% B, 1.6-2.0 min 99% B; Flow 0.8 mL/min; Temperature: 60° C.; DAD scan: 210-400 nm.

[0348] Analytical Chiral HPLC: Rₜ = 0.80 min.

[0349] ¹H-NMR (600 MHz, CDCl3) δ [ppm]: -0.006 (0.17), 0.000 (4.06), 0.005 (0.19), 0.772 (0.44), 0.816 (16.00), 0.880 (0.19), 0.969 (0.54), 0.981 (0.62), 0.987 (0.73), 0.989 (0.80), 0.999 (0.79), 1.001 (0.80), 1.007 (0.70), 1.015 (0.41), 1.020 (0.77), 1.036 (0.77), 1.044 (0.88), 1.057 (0.93), 1.064 (0.94), 1.069 (1.08), 1.076 (1.00), 1.086 (0.47), 1.090 (0.59), 1.096 (0.51), 1.253 (0.81), 1.260 (0.82), 1.266 (0.73), 1.278 (0.76), 1.282 (1.02), 1.287 (0.83), 1.299 (0.81), 1.305 (0.86), 1.313 (0.39), 1.324 (0.90), 1.334 (0.94), 1.344 (1.03), 1.354 (1.03), 1.365 (0.45), 1.374 (0.43), 1.432 (0.59), 1.437 (0.64), 1.445 (0.72), 1.451 (0.96), 1.454 (0.88), 1.457 (0.79), 1.460 (0.87), 1.465 (0.68), 1.468 (0.78), 1.471 (0.71), 1.474 (0.96), 1.480 (0.52), 1.488 (0.46), 1.494 (0.47), 1.506 (0.43), 1.512 (0.49), 1.528 (0.85), 1.534 (1.04), 1.550 (0.85), 1.556 (0.84), 1.572 (0.55), 1.574 (0.61), 1.579 (0.75), 1.586 (0.60), 1.590 (0.81), 1.595 (0.92), 1.602 (0.83), 1.607 (1.01), 1.611 (0.91), 1.616 (0.83), 1.623 (1.01), 1.628 (1.22), 1.640 (1.51), 1.761 (0.34), 1.767 (0.37), 1.779 (0.68), 1.785 (0.77), 1.799 (0.70), 1.806 (0.68), 1.816 (0.29), 1.823 (0.30), 1.862 (0.36), 1.868 (0.80), 1.873 (1.01), 1.882 (1.30), 1.884 (1.47), 1.889 (1.08), 1.898 (1.30), 1.905 (1.12), 1.910 (0.58), 1.992 (0.36), 2.000 (0.71), 2.004 (0.72), 2.014 (0.49), 2.022 (0.68), 2.026 (0.67), 2.033 (0.35), 2.052 (0.38), 2.062 (0.43), 2.067 (0.72), 2.074 (0.56), 2.077 (0.75), 2.083 (0.62), 2.090 (0.70), 2.092 (0.54), 2.100 (0.62), 2.105 (0.40), 2.115 (0.33), 2.312 (0.50), 2.319 (0.68), 2.324 (0.56), 2.334 (0.85), 2.339 (1.05), 2.346 (0.78), 2.372 (0.43), 2.396 (0.84), 2.403 (0.73), 2.405 (0.74), 2.418 (0.98), 2.426 (0.94), 2.439 (0.42), 2.441 (0.42), 2.447 (0.39), 3.358 (2.18), 3.361 (2.22), 3.364 (2.35), 3.367 (2.14), 3.633 (0.88), 3.647 (1.53), 3.662 (0.85), 3.944 (2.87), 3.950 (2.82), 4.173 (0.59), 4.263 (2.71), 4.281 (1.88), 5.900 (2.52), 7.267 (12.12).

### Example 15

[0350] (1alpha,2alpha,15beta,17beta)-15,17-dihydroxy-1,2-epoxyandrost-4-en-3-one

[chemical structure]

[0351] For the preparation of the title compound see Example 13. The crude product (1.04 g) was further purified by flash chromatography using silica gel (dichloromethane/ethanol gradient) and by preparative HPLC to give the title compound (2.8 mg).

### Preparative Chiral HPLC Method

[0352] Instrument: Waters Autopurificationsystem; Column: Waters XBrigde C18 5 µ 50x50 mm; Eluent A: Water + 0.1 Vol-% Formic acid (99%), Eluent B: Acetonitrile; Gradient: 0.00-0.50 min 5% B (50-100 mL/min), 0.51-8.00 min 5 - 35% B (100 mL/min), DAD scan: 210-400 nm.

### Analytical Chiral HPLC Method

[0353] Instrument: Waters Acquity UPLCMS SingleQuad; Column: Acquity UPLC BEH C18 1.7 µm, 50×2.1 mm; Eluent A: Water + 0.1 Vol-% Formic acid (99 %), Eluent B: Acetonitrile; Gradient: 0-1.6 min 1-99% B, 1.6-2.0 min 99 % B; Flow 0.8 mL/min; Temperature: 60° C.; DAD scan: 210-400 nm.

[0354] Analytical Chiral HPLC: Rₜ = 0.73 min.

[0355] ¹H-NMR (600 MHz, CHLOROFORM-d) δ [ppm]: -0.006 (0.48), 0.000 (11.79), 0.005 (0.44), 0.825 (1.12), 0.835 (1.15), 0.844 (1.18), 0.854 (1.23), 0.857 (1.22), 0.881 (0.35), 1.070 (0.62), 1.076 (0.66), 1.091 (1.49), 1.104 (13.48), 1.112 (1.31), 1.119 (1.11), 1.134 (0.39), 1.141 (0.37), 1.227 (0.58), 1.234 (0.66), 1.254 (2.09), 1.266 (0.93), 1.272 (0.78), 1.398 (0.70), 1.440 (15.22), 1.457 (1.29), 1.513 (0.45), 1.546 (0.44), 1.571 (2.00), 1.576 (2.63), 1.590 (16.00), 1.610 (1.91), 1.614 (2.15), 1.619 (1.27), 1.635 (0.91), 1.641 (0.91), 1.657 (0.40), 1.663 (0.37), 1.786 (0.38), 1.792 (0.80), 1.797 (0.85), 1.804 (0.43), 1.808 (0.34), 1.815 (0.61), 1.820 (0.62), 1.872 (0.61), 1.877 (0.96), 1.883 (0.58), 1.893 (0.64), 1.898 (0.85), 1.905 (0.51), 2.108 (0.34), 2.114 (0.32), 2.126 (0.65), 2.133 (0.70), 2.145 (0.62), 2.152 (0.65), 2.215 (0.47), 2.219 (0.62), 2.226 (0.54), 2.236 (0.60), 2.240 (0.78), 2.247 (0.68), 2.262 (0.38), 2.269 (0.60), 2.274 (0.52), 2.283 (0.45), 2.291 (0.57), 2.294 (0.51), 2.405 (0.51), 2.414 (0.47), 2.428 (0.86), 2.435 (0.79), 2.449 (0.41), 2.457 (0.36), 2.603 (0.67), 2.616 (0.88), 2.617 (0.84), 2.627 (0.79), 2.630 (0.83), 2.640 (0.83), 2.642 (0.82), 2.654 (0.65), 3.385 (1.56), 3.388 (1.69), 3.391 (1.66), 3.395 (1.55), 3.571 (0.58), 3.585 (1.12), 3.600 (0.56), 3.678 (2.43), 3.684 (2.34), 4.182 (0.51), 4.191 (0.87), 4.199 (0.51), 5.746 (2.23).

### Example 16

[0356] (6beta, 17beta)-6, 17-dihydroxyandrosta-1,4-dien-3-one

[chemical structure]

[0357] For the preparation of the title compound see Example 13. The crude product (1.04 g) was further purified by flash chromatography using silica gel (dichloromethane/ethanol gradient) and by preparative HPLC to give the title compound (2.4 mg).

### Preparative Chiral HPLC Method

[0358] Instrument: Waters Autopurificationsystem; Column: Waters XBrigde C18 5 µ 50×50 mm; Eluent A: Water + 0.1 Vol-% Formic acid (99 %), Eluent B: Acetonitrile; Gradient: 0.00-0.50 min 5% B (50-100 mL/min), 0.51-8.00 min 5 - 35% B (100 mL/min), DAD scan: 210-400 nm.

### Analytical Chiral HPLC Method

[0359] Instrument: Waters Acquity UPLCMS SingleQuad; Column: Acquity UPLC BEH C18 1.7 µm, 50×2.1 mm; Eluent A: Water + 0.1 Vol-% Formic acid (99%), Eluent B: Acetonitrile; Gradient: 0-1.6 min 1-99% B, 1.6-2.0 min 99% B; Flow 0.8 mL/min; Temperature: 60° C.; DAD scan: 210-400 nm.

[0360] Analytical Chiral HPLC: Rₜ = 0.75 min.

[0361] ¹H-NMR (600 MHz, CDCl3) δ [ppm]: 0.000 (7.05), 0.850 (0.34), 0.857 (10.48), 0.868 (0.34), 0.960 (0.40), 0.972 (0.39), 0.979 (0.55), 0.990 (0.55), 0.998 (0.48), 1.010 (0.46), 1.056 (0.37), 1.065 (0.43), 1.075 (0.61), 1.082 (0.65), 1.089 (0.52), 1.094 (0.57), 1.096 (0.56), 1.103 (1.02), 1.110 (0.72), 1.118 (0.75), 1.131 (0.41), 1.139 (0.42), 1.215 (0.47), 1.220 (0.44), 1.235 (0.62), 1.238 (0.70), 1.241 (0.73), 1.243 (0.71), 1.253 (1.01), 1.258 (1.09), 1.264 (0.79), 1.377 (0.64), 1.387 (0.69), 1.398 (0.76), 1.407 (0.80), 1.418 (0.40), 1.427 (0.45), 1.440 (1.03), 1.456 (12.77), 1.464 (0.72), 1.470 (0.66), 1.473 (0.63), 1.476 (0.51), 1.478 (0.58), 1.487 (0.52), 1.490 (0.47), 1.492 (0.64), 1.499 (0.39), 1.506 (0.37), 1.512 (0.39), 1.562 (0.37), 1.571 (0.42), 1.602 (1.00), 1.608 (1.08), 1.614 (1.25), 1.619 (1.41), 1.623 (1.48), 1.628 (1.35), 1.631 (1.37), 1.635 (1.48), 1.638 (1.35), 1.644 (1.17), 1.651 (1.05), 1.656 (0.96), 1.705 (0.40), 1.712 (0.39), 1.727 (0.56), 1.734 (0.56), 1.748 (0.66), 1.754 (0.70), 1.768 (0.66), 1.773 (0.86), 1.777 (0.87), 1.780 (0.57), 1.785 (0.56), 1.792 (0.36), 1.795 (0.39), 1.799 (0.37), 1.883 (0.57), 1.889 (0.73), 1.895 (0.53), 1.905 (0.56), 1.910 (0.66), 1.916 (0.46), 2.052 (0.49), 2.057 (0.81), 2.062 (0.63), 2.069 (0.34), 2.074 (0.85), 2.081 (1.05), 2.085 (1.41), 2.090 (0.63), 2.093 (0.33), 2.097 (0.54), 2.102 (0.65), 2.107 (0.74), 2.112 (0.39), 2.122 (0.72), 2.127 (0.45), 3.646 (0.92), 3.660 (1.30), 3.674 (0.85), 4.543 (0.81), 4.548 (1.50), 4.553 (0.85), 6.162 (2.12), 6.165 (2.42), 6.210 (1.34), 6.213 (1.21), 6.226 (1.36), 6.229 (1.27), 7.052 (1.95), 7.069 (1.96), 7.264 (16.00).

### Example 17

[0362] (17beta)-17,19-dihydroxyandrost-4-en-3-one

[chemical structure]

### Preparation 1

### Expression System

[0363] The strain E. coli BL 21 (DE3) pETM11-BM3-254 was provided by M. T. Reetz and is described in (Kille Sabrina 2011) (DOI:10.1038/NCHEM.1113). The protein and gene sequence are listed under SEQ ID No. 2 and 60, respectively.

### Cultivation

[0364] Medium of the preculture: tryptone (10 g/L), sodium chloride (10 g/L) and yeast extract (5 g/L) in demineralized water. The media was sterilized at 121° C. for 20 minutes. Afterwards kanamycin (50 mg/L) was added.

[0365] One preculture (100 mL) was inoculated with the strain E. coli BL 21 (DE3) pETM11-BM3-254 (50 µL) containing the desired plasmids and was shaken at 37° C. and 165 rpm for 16 hours. This preculture (10 mL) was used to inoculate one 1 L Biostat Q fermenter. The cultivation medium was prepared in the fermenter. Tryptone (20 g/L), sodium chloride (20 g/L), yeast extract (10 g/L) and Pluronic® PE 8100 (0.1 mL) were dissolved in demineralized water (1.0 L) and sterilized for 30 minutes at 121° C. in the fermenter. Afterwards kanamycin (50 mg) in demineralized water (5 mL) was added. After the inoculation of the fermenter the inoculated culture was stirred at 500 rpm at 37° C. with an aeration rate of 0.4 L/min and an oxygen partial pressure of 30 % was maintained by the stirring at a rate of up to 1500 rpm. After 3 hours an aqueous glucose solution (50%, 4 g/h) was added. After 4 hours and 50 minutes an OD550 of 16.1 was reached, the temperature was decreased to 28° C. within 5 minutes and IPTG (238 mg) in demineralized water (10 mL) was added to start the protein expression. After additional 9 hours the cells (39.1 g) were harvested by centrifugation, suspended in buffer (39.1 mL; KH2PO4 (4 g/L), K2HPO4 (12.3 g/L), glycerol (4% (v/v)), glucose (5% (w/v)), EDTA (0.5 mM)), frozen in liquid nitrogen and stored at -80° C. until further use in aliquots of 1 × 75 mL, 3 × 1 mL.

### Biotransformation

[0366] To two 1 L Biostat Q fermenter each containing KH2PO4 (3 g), K2HPO4 (9.23 g), Pluronic® PE 8100 (0.1 mL), demineralized water (0.75 L), aqueous glucose solution (50 %, 15 mL) and aqueous EDTA solution (0.5 M, 0.75 mL) (17beta)-17-hydroxyandrost-4-en-3-one (75.0 mg, 260 µmol) dissolved in DMF (5 mL) was added and the mixture was stirred at 300 rpm at 27° C. with an aeration rate of 0.5 L/min. Cells in buffer (each 37 mL) were added and the biotransformation was maintained at an oxygen partial pressure of 50% by varying the stirring rate to up to 800 rpm. The pH value was maintained at pH7.4. After 26 hours aqueous glucose solution was added (50%, 60 mL). After 102.5 hours the biotransformation was extracted with 4-methyl-2-pentanone. The organic layer was concentrated to give an oil (1.09 g) which was dissolved in methanol and was concentrated to give an oil (0.91 g). The crude product was further purified by flash chromatography using silica gel (dichloromethane/ methanol gradient) and by preparative HPLC to give the title compound (4.0 mg, 2,52 % yield).

### Preparative Chiral HPLC Method

[0367] Instrument: Labomatic HD5000, Labocord-5000; Gilson GX-241, Labcol Vario 4000, Column: Chiralpak IA 5 µ 250×30 mm; Eluent A: Acetonitrile + 0.1 Vol-% Diethylamine (99%); Eluent B: Ethanol; Isocratic: 90% A + 10% B; Flow 50.0 mL/min; UV 254 nm.

### Analytical Chiral HPLC Method

[0368] Instrument: Agilent HPLC 1260; Column: Chiralpak IA 3 µ 100×4.6 mm; Eluent A: Acetonitrile + 0.1 Vol-% Diethylamine (99%); Eluent B: Ethanol; Isocratic: 90% A + 10% B; Flow 1.4 mL/min; Temperature: 25° C.; DAD 254 nm.

[0369] ¹H-NMR (600 MHz, CHLOROFORM-d) δ [ppm]: 0.79 (s, 3H), 0.92 - 0.99 (m, 1H), 1.02 - 1.09 (m, 3H), 1.31 (qd, 2H), 2.05 - 2.13 (m, 1H), 2.32 - 2.44 (m, 4H), 2.75 (ddd, 1H), 3.65 (t, 1H), 3.92 (d, 1H), 4.08 (dd, 1H), 5.96 (s, 1H).

### Preparation 2

### Expression System

[0370] In a second preparation the title compound was synthesized with the strain E. coli BL 21 Gold (DE3) ΔdkgA :: FRT T7 gdh and plasmid pETM11-BM3-254. The construction of the E. coli BL 21 Gold (DE3) ΔdkgA :: FRT T7 gdh strain is described in (Agudo R 2012). The strain was rendered competent and transformed with pETM11-BM3-254.

### Preparation of Competent Cells & Transformation

[0371] Required solutions: TFB1 buffer containing KCH3COO (2.95 g/L), KCI (7.46 g/L), CaCl2 (1.11 g/L), glycerol (130 mL). TFB2 buffer containing KCI (0.75 g/L), CaCl2(11.1 g/L), MOPS buffer (2.1 g/L), glycerol (130 mL). The buffers were autoclaved. A solution of MgCl2x6H2O (95.2 g/L) was prepared including sterile filtration.

[0372] A culture (5 mL) of Luria-Bertani broth medium (10 g/L bacto tryptone, 5 g/L bacto yeast extract, 10 g/L sodium chloride) was inoculated with a glycerol culture (2 µl) of the strain E. coli BL 21 Gold (DE3) ΔdkgA :: FRT T7 gdh. This culture was shaken at 37° C. and 165 rpm overnight. The overnight culture (1 mL) was used to inoculate a culture (100 mL) of Luria-Bertani broth medium. The culture was incubated at 37° C. and 165 rpm until an OD600 of 0.4-0.5 was reached, whereupon the culture was subjected to centrifugation at 4° C. and 4000 rpm for 15 minutes. All following substances were pre-cooled in ice. The supernatant of the culture was discarded and the cell pellet was resuspended in TFB1 buffer (30 mL) and 3.2 ml MgCl2 solution (3.2 mL) and incubated on ice for 15 min. The mixture was subjected to centrifugation at 4° C. and 4000 rpm for 10 minutes. The supernatant was discarded and the cell pellet was resuspended in TFB2 buffer (4 mL) and was incubated for 15 min on ice. The cells were aliquoted à 50 µL, were snap frozen in liquid nitrogen and stored at -80° C.

[0373] For transformation 50 µL of the competent cells were thawed on ice for 15 min, 1-2 µL of plasmid (pETM11-BM3-254) were added, and the mixture was incubated on ice for 30 min. A heat shock was carried out for 45 sec at 42° C., followed by incubation on ice for 5 min. After the addition of SOC Outgrowth Medium (350 µL), the mixture was incubated for 1 h at 37° C. and 1000 rpm shaking. The cells (100 µL) were placed on Luria-Bertani broth agar plates with kanamycin (50 mg/L) and incubated overnight at 37° C. Single colonies were picked and sequenced.

### Cultivation of E. Coli BL 21 Gold (DE3) ΔdkgA :: FRT T7 Gdh pETM11-BM3-254 and Protein Expression

[0374] Media of the preculture: tryptone (10 g/L), sodium chloride (10 g/L) and yeast extract (5 g/L) in demineralized water. The media was sterilized at 121° C. for 20 minutes. Afterwards kanamycin (50 mg/L) was added.

### Cell Cultivation 1

[0375] One preculture (100 mL) was inoculated with the strain E. coli BL 21 Gold (DE3) ΔdkgA :: FRT T7 gdh pETM11-BM3-254 (50 µL) containing the desired plasmid and was shaken at 37° C. and 165 rpm for 16 hours. This preculture (10 mL) was used to inoculate one 1 L Biostat Q fermenter. The cultivation media was prepared in the fermenters. Tryptone (20 g/L), sodium chloride (20 g/L), yeast extract (10 g/L) and Pluronic® PE 8100 (0.1 mL) were dissolved in demineralized water (1.0 L) and sterilized for 30 minutes at 121° C. in the fermenter. Afterwards kanamycin (50 mg) in demineralized water (5 mL) and Oxford trace metal solution (0.25 mL) was added. After the inoculation of the fermenter, the inoculated culture was stirred at 500 rpm at 37° C. with an aeration rate of 0.4 L/min and an oxygen partial pressure of 30 % maintained by the stirring up to 1500 rpm. After 3 hours an aqueous glucose solution was added (25 %, 8 g/h). After 5 hours and 30 minutes OD550 of 15.72 was reached, the temperature was decreased to 28° C. within 10 minutes and IPTG (238 mg) in demineralized water (10 mL) was added to start the protein expression. After additional 9 hours and 50 minutes the cells (34.88 g) were harvested by centrifugation, suspended in buffer (34.88 mL; KH2PO4 (4 g/L), K2HPO4 (12.3 g/L), glycerol (4% (v/v)), glucose (5% (w/v)), EDTA (0.5 mM)), frozen in liquid nitrogen and stored at -80° C. until further use in aliquots of 2 × 25 mL, 3 × 1 mL and 1 × 13 ml.

### Cell Cultivation 2

[0376] One preculture (100 mL) was inoculated with the strain E. coli BL 21 Gold (DE3) ΔdkgA :: FRT T7 gdh pETM11-BM3-254 (50 µL) containing the desired plasmid and was shaken at 37° C. and 165 rpm for 16 hours. This preculture (10 mL) was used to inoculate one 1 L Biostat Q fermenter. The cultivation media was prepared in the fermenters. Tryptone (20 g/L), sodium chloride (20 g/L), yeast extract (10 g/L) and Pluronic® PE 8100 (0.1 mL) was dissolved in demineralized water (4.0 L) and sterilized for 30 minutes at 121° C. in the fermenter. Afterwards kanamycin (50 mg) in demineralized water (5 mL) and Oxford trace metal solution (0.25 mL) was added. After inoculation of the fermenter, the inoculated culture was stirred at 500 rpm at 37° C. with an aeration rate of 0.4 L/min, and an oxygen partial pressure of 30% was maintained by the stirring up to 1500 rpm. After 3 hours an aqueous glucose solution (25%, 8 g/h) was added. After 5 hours and 5 minutes an OD550 of 16.72 was reached, the temperature was decreased to 28° C. within 5 minutes and IPTG (238 mg) in demineralized water (10 mL) and aminolevulinic acid (42 mg) in demineralized water (5 mL) were added to start the protein expression. After additional 9 hours and 10 minutes the cells (38 g) were harvested by centrifugation, suspended in buffer (38 g; KH2PO4 (4 g/L), K2HPO4 (12.3 g/L), glycerol (4% (v/v)), glucose (5% (w/v)), EDTA (0.5 mM)), frozen in liquid nitrogen and stored at -80° C. until further use in aliquots of 2 × 25 mL, 3 × 1 mL and 1 × 19 ml.

### Cell Cultivation 3

[0377] One preculture (100 mL) was inoculated with the strain E. coli BL 21 Gold (DE3) ΔdkgA :: FRT T7 gdh pETM11-BM3-254 (50 µL) containing the desired plasmid and was shaken at 37° C. and 165 rpm for 16 hours. This preculture (100 mL) was used to inoculate one 10 L steel fermenter. The cultivation media was prepared in the fermenter. Tryptone (20 g/L), sodium chloride (20 g/L), yeast extract (10 g/L) and Pluronic® PE 8100 (0.1 mL) were dissolved in demineralized water (8.8 L) and sterilized for 30 minutes at 121° C. in the fermenter. Afterwards kanamycin (500 mg) in demineralized water (10 mL) and Oxford trace metal solution (2.5 mL) was added. After inoculation of the fermenter (16 hours old preculture), the inoculated culture was stirred at 400 rpm at 37° C. with an aeration rate of 4.0 L/min and an oxygen partial pressure of 30% maintained by stirring up to 1200 rpm. After 3 hours an aqueous glucose solution (25%, 80 g/h) was added. After 5 hours and 20 minutes an OD550 of 16.69 was reached, the temperature was decreased to 28° C. within 5 minutes and IPTG (2.38 g) in demineralized water (20 mL) and aminolevulinic acid (420 mg) in demineralized water (20 mL) was added to start the protein expression. After additional 9 hours and 25 minutes the cells (298.42 g) were harvested by centrifugation, suspended in buffer (298.42 g; KH2PO4 (4 g/L), K2HPO4 (12.3 g/L), glycerol (4% (v/v)), glucose (5% (w/v)), EDTA (0.5 mM)), frozen in liquid nitrogen and stored at -80° C. until further use in aliquots of 7 × 25 mL, 3 × 1 mL and 7 × 50 ml.

### Biotransformation 1

[0378] To one 1 L Biostat Q fermenter which contained KH2PO4 (4 g), K2HPO4 (12.3 g), Pluronic® PE 8100 (0.1 mL), demineralized water (930 mL), aqueous glucose solution (50%, 20 mL) and aqueous EDTA solution (0.5 M, 1 mL) (17beta)-17-hydroxyandrost-4-en-3-one (100 mg, 347 µmol) dissolved in DMF (5 mL) was added and the mixture was stirred at 300 rpm at 27° C. with an aeration rate of 0.5 L/min. The pH value was maintained at pH 7.4. Cells in buffer (50 mL of cell cultivation 1) were added, and the biotransformation was maintained at an oxygen partial pressure of 50% by varying the stirring rate to up to 800 rpm. After 26.5 hours the biotransformation was extracted with 4-methyl-2-pentanone.

### Biotransformation 2

[0379] To one 1 L Biostat Q fermenter which contained KH2PO4 (4 g), K2HPO4 (12.3 g), Pluronic® PE 8100 (0.1 mL), demineralized water (930 mL), aqueous glucose solution (50%, 20 mL) and aqueous EDTA solution (0.5 M, 1 mL) (17beta)-17-hydroxyandrost-4-en-3-one (100 mg, 347 µmol) dissolved in DMF (5 mL) was added and the mixture was stirred at 300 rpm at 27° C. with an aeration rate of 0.5 L/min. The pH value was maintained at pH 7.4. Cells in buffer (50 mL of cell cultivation 2) were added, and the biotransformation was maintained at an oxygen partial pressure of 50% by varying the stirring rate to up to 800 rpm. After 26.5 hours the biotransformation was extracted with 4-methyl-2-pentanone.

### Biotransformation 3

[0380] To one 1 L Biostat Q fermenter which contained KH2PO4 (4 g), K2HPO4 (12.3 g), Pluronic® PE 8100 (0.1 mL), demineralized water (930 mL), aqueous glucose solution (50 %, 20 mL) and aqueous EDTA solution (0.5 M, 1 mL) (17beta)-17-hydroxyandrost-4-en-3-one (100 mg, 347 µmol) dissolved in DMF (5 mL) was added and the mixture was stirred at 300 rpm at 27° C. with an aeration rate of 0.5 L/min. The pH value was maintained at pH 7.4. Cells in buffer (50 mL of cell cultivation 3) were added, and the biotransformation was maintained at an oxygen partial pressure of 50 % by varying the stirring rate to up to 1200 rpm. After 4 hours additional cells in buffer (25 mL of cell cultivation 3) were added. After 26 hours and 25 minutes the biotransformation was extracted with 4-methyl-2-pentanone.

### Biotransformation 4 and 5

[0381] To two 1 L Biostat Q fermenter each containing KH2PO4 (4 g), K2HPO4 (12.3 g), Pluronic® PE 8100 (0.1 mL), demineralized water (930 mL), aqueous glucose solution (50%, 20 mL) and aqueous EDTA solution (0.5 M, 1 mL) (17beta)-17-hydroxyandrost-4-en-3-one (25 mg, 87 µmol) dissolved in DMF (2.5 mL) was added and the mixture was stirred at 300 rpm at 27° C. with an aeration rate of 0.5 L/min. The pH value was maintained at pH 7.4. Cells in buffer (50 mL of cell cultivation 3) were added, and the biotransformation was maintained at an oxygen partial pressure of 50 % by varying the stirring rate to up to 800 rpm. After 26 hours and 25 minutes the biotransformation was extracted with 4-methyl-2-pentanone.

[0382] The organic phases of the five biotransformations were combined and concentrated to give an oil (4.45 g) which was slurried with methanol and was filtered and concentrated to give an oil (1.23 g). The crude product was further purified by flash chromatography using silica gel (dichloromethane/ethanol gradient) and by preparative HPLC to give the title compound (13.0 mg).

### Analytical HPLC Method

[0383] Instrument: Waters Acquity UPLCMS SingleQuad; Column: Acquity UPLC BEH C18 1.7 µm, 50×2.1 mm; Eluent A: Water + 0.1 Vol-% formic acid (99%), Eluent B: Acetonitrile; Gradient: 0-1.6 min 1-99% B, 1.6-2.0 min 99% B; Flow 0.8 mL/min; Temperature: 60° C.; DAD scan: 210-400 nm.

### Preparative HPLC Method

[0384] Instrument: Waters Autopurificationsystem; Column: Waters XBrigde C18 5 µ 150×50 mm; Eluent A: Water + 0.1 Vol-% formic acid (99 %), Eluent B: Acetonitril; Gradient: 0.00-0.50 min 9% B (40-100 mL/min), 0.51-8.50 min 19-41% B (100 mL/min), DAD scan: 210-400 nm.

### Example 18

[0385] (15beta,17beta)-15,17,19-trihydroxyandrost-4-en-3-one

[chemical structure]

[0386] For the preparation of the title compound see second preparation of Example 17. The crude product (1.23 g) was further purified by flash chromatography using silica gel (dichloromethane/ethanol gradient) and by preparative HPLC to give the title compound (2.2 mg).

### Preparative Chiral HPLC Method

[0387] Instrument: Waters Autopurificationsystem; Column: Waters XBrigde C18 5 µ 150×50 mm; Eluent A: Water + 0.1 Vol-% Formic acid (99%), Eluent B: Acetonitrile; Gradient: 0.00-0.50 min 5 % B (40-100 mL/min), 0.51-8.50 min 5-30% B (100 mL/min), DAD scan: 210-400 nm.

### Analytical Chiral HPLC Method

[0388] Instrument: Waters Acquity UPLCMS SingleQuad; Column: Acquity UPLC BEH C18 1.7 µm, 50×2.1 mm; Eluent A: Water + 0.1 Vol-% Formic acid (99%), Eluent B: Acetonitrile; Gradient: 0-1.6 min 1-99% B, 1.6-2.0 min 99% B; Flow: 0.8 mL/min; Temperature: 60° C.; DAD scan: 210-400 nm.

[0389] Analytical Chiral HPLC: Rₜ = 0.63 min.

[0390] ¹H-NMR (600 MHz, DMSO-d6) δ [ppm]: 0.61 (dd, 1H), 0.82 - 0.97 (m, 6H), 1.37 - 1.47 (m, 2H), 1.51 - 1.57 (m, 1H), 1.61 (td, 1H), 1.64 - 1.68 (m, 1H), 1.89 - 1.97 (m, 1H), 2.07 - 2.17 (m, 2H), 2.22 - 2.32 (m, 3H), 2.37 - 2.45 (m, 2H), 2.58 - 2.67 (m, 2H), 3.26 - 3.32 (m, 1H), 3.73 (dd, 1H), 3.85 (dd, 1H), 3.91 - 3.98 (m, 1H), 4.35 (d, 1H), 4.46 (d, 1H), 4.72 (t, 1H), 5.74 (s, 1H).

[0391] ¹H-NMR (600 MHz, DMSO-d6) δ [ppm]: -0.006 (0.85), 0.005 (0.77), 0.593 (1.06), 0.603 (1.08), 0.612 (1.10), 0.621 (1.08), 0.832 (0.48), 0.847 (0.83), 0.853 (0.89), 0.869 (0.54), 0.875 (0.56), 0.889 (16.00), 0.900 (0.68), 0.907 (0.64), 0.924 (1.06), 0.943 (1.10), 0.957 (0.56), 0.964 (0.54), 1.383 (0.68), 1.387 (0.70), 1.398 (0.85), 1.402 (0.95), 1.406 (0.83), 1.410 (0.77), 1.421 (1.12), 1.425 (1.31), 1.440 (0.68), 1.446 (0.66), 1.529 (0.77), 1.535 (0.83), 1.552 (0.58), 1.557 (0.54), 1.588 (0.46), 1.602 (0.83), 1.611 (0.85), 1.625 (0.48), 1.634 (0.46), 1.651 (1.02), 1.656 (0.60), 1.666 (0.64), 1.671 (0.95), 1.918 (0.73), 1.924 (0.79), 1.937 (0.73), 1.942 (0.75), 2.076 (0.44), 2.087 (0.60), 2.092 (0.79), 2.099 (0.56), 2.113 (0.73), 2.120 (1.37), 2.126 (1.14), 2.134 (`0.54), 2.141 (0.58), 2.145 (0.64), 2.230 (0.77), 2.234 (0.56), 2.248 (0.79), 2.255 (1.31), 2.270 (1.35), 2.275 (0.93), 2.280 (1.24), 2.283 (1.22), 2.294 (1.43), 2.306 (0.77), 2.382 (0.81), 2.385 (1.16), 2.388 (1.64), 2.391 (1.31), 2.405 (0.75), 2.411 (0.70), 2.519 (3.59), 2.522 (3.63), 2.525 (3.05), 2.600 (0.58), 2.610 (1.08), 2.613 (1.04), 2.616 (1.33), 2.619 (1.02), 2.624 (0.79), 2.628 (0.75), 2.633 (0.70), 2.637 (0.62), 2.652 (0.62), 2.661 (0.48), 3.265 (0.54), 3.273 (0.58), 3.279 (1.14), 3.287 (1.16), 3.293 (0.58), 3.302 (0.56), 3.713 (0.99), 3.723 (1.04), 3.732 (1.31), 3.741 (1.26), 3.837 (1.02), 3.846 (1.08), 3.855 (0.81), 3.863 (0.77), 3.943 (0.87), 3.949 (0.87), 4.348 (2.88), 4.355 (2.82), 4.454 (2.47), 4.462 (2.38), 4.711 (1.18), 4.719 (2.47), 4.728 (1.16), 5.740 (3.34), 6.552 (0.56), 8.318 (1.16).

### Example 19

[0392] (2beta, 15beta, 17beta)-2,15,17-trihydroxyandrost-4-en-3-one

[chemical structure]

[0393] For the preparation of the title compound see second preparation of Example 17. The crude product (1.23 g) was further purified by flash chromatography using silica gel (dichloromethane/ethanol gradient) and by preparative HPLC to give the title compound (1 mg).

### Preparative Chiral HPLC Method

[0394] Instrument: Waters Autopurificationsystem; Column: Waters XBrigde C18 5 µ 150×50 mm; Eluent A: Water + 0.1 Vol-% Formic acid (99 %), Eluent B: Acetonitrile; Gradient: 0.00-0.50 min 5% B (40-100 mL/min), 0.51-8.50 min 5-30% B (100 mL/min), DAD scan: 210-400 nm.

### Analytical Chiral HPLC Method

[0395] Instrument: Waters Acquity UPLCMS SingleQuad; Column: Acquity UPLC BEH C18 1.7 µm, 50×2.1 mm; Eluent A: Water + 0.1 Vol-% Formic acid (99%), Eluent B: Acetonitrile; Gradient: 0-1.6 min 1-99% B, 1.6-2.0 min 99% B; Flow: 0.8 mL/min; Temperature: 60° C.; DAD scan: 210-400 nm.

[0396] Analytical Chiral HPLC: Rₜ = 0.64 min.

[0397] ¹H-NMR (400 MHz, CHLOROFORM-d) δ [ppm]: 0.774 (1.91), 0.788 (1.77), 0.802 (1.30), 0.816 (1.29), 0.997 (0.71), 1.010 (14.33), 1.027 (0.71), 1.031 (0.70), 1.040 (0.91), 1.051 (1.46), 1.061 (0.86), 1.072 (0.57), 1.082 (0.82), 1.092 (0.42), 1.129 (0.40), 1.136 (0.42), 1.148 (0.61), 1.160 (16.00), 1.170 (0.89), 1.174 (0.86), 1.184 (3.29), 1.191 (1.47), 1.210 (0.65), 1.349 (0.55), 1.358 (0.57), 1.381 (0.95), 1.389 (0.89), 1.407 (0.92), 1.415 (0.98), 1.434 (0.69), 1.439 (0.56), 1.443 (0.76), 1.456 (0.60), 1.464 (2.08), 1.474 (1.47), 1.498 (3.80), 1.507 (1.42), 1.517 (1.52), 1.523 (1.55), 1.533 (2.86), 1.538 (1.94), 1.554 (1.66), 1.559 (1.68), 1.640 (0.47), 1.708 (0.49), 1.716 (0.89), 1.724 (0.89), 1.733 (0.51), 1.740 (0.42), 1.748 (0.63), 1.757 (0.62), 1.779 (0.74), 1.788 (1.01), 1.796 (0.61), 1.811 (0.61), 1.819 (0.93), 1.828 (0.54), 1.943 (0.50), 1.979 (0.98), 2.026 (1.06), 2.036 (0.61), 2.057 (0.70), 2.063 (0.57), 2.106 (0.64), 2.191 (0.71), 2.198 (1.06), 2.207 (1.84), 2.215 (0.62), 2.227 (1.79), 2.234 (1.28), 2.240 (0.81), 2.400 (1.05), 2.414 (1.07), 2.434 (0.99), 2.448 (0.98), 2.512 (0.43), 2.516 (0.45), 2.521 (0.76), 2.532 (0.66), 2.535 (0.71), 2.540 (1.23), 2.543 (1.28), 2.558 (0.89), 2.562 (1.02), 2.568 (0.44), 2.577 (1.01), 2.580 (1.05), 2.598 (0.68), 3.504 (1.26), 3.526 (2.58), 3.547 (1.18), 4.093 (1.59), 4.101 (0.86), 4.107 (1.71), 4.114 (1.31), 4.119 (0.79), 4.127 (1.90), 4.133 (0.80), 4.142 (1.13), 5.234 (4.88), 5.755 (3.02), 5.757 (2.97).

### Example 20

[0398] (2beta, 17beta)-2,17,19-trihydroxyandrost-4-en-3-one

[chemical structure]

Media of the preculture: tryptone (10 g/L), sodium chloride (10 g/L) and yeast extract (5 g/L) in demineralized water. The media was sterilized at 121° C. for 20 minutes. Afterwards kanamycin (50 mg/L) was added.

### Cell Cultivation 1

[0399] One preculture (100 mL) was inoculated with the strain E. coli BL 21 Gold (DE3) ΔdkgA :: FRT T7 gdh pETM11-BM3-254 (50 µL) containing the desired plasmids and was shaken at 37° C. and 165 rpm for 16 hours. This preculture (10 mL) was used to inoculate one 1 L Biostat Q fermenter. The cultivation media was prepared in the fermenter. Tryptone (20 g/L), sodium chloride (20 g/L), yeast extract (10 g/L) and Pluronic® PE 8100 (0.5 mL) were dissolved in demineralized water (1.0 L) and sterilized for 30 minutes at 121° C. in the fermenter. Afterwards kanamycin (50 mg) in demineralized water (5 mL) was added. After the inoculation of the fermenter, the inoculated culture was stirred at 500 rpm at 37° C. with an aeration rate of 0.4 L/min and an oxygen partial pressure of 30% was maintained by stirring of up to 1500 rpm. After 3 hours an aqueous glucose solution (25%, 8 g/h) was added. After 5 hours and 30 minutes an OD550 of 16.2 was reached, the temperature was decreased to 28° C. within 15 minutes and IPTG (0.24 g) in demineralized water (10 mL) was added to start the protein expression. After additional 10 hours and 5 minutes the cells were harvested by centrifugation (38.8 g), suspended in buffer (38.8 mL; KH2PO4 (4 g/L), K2HPO4 (12.3 g/L), glycerol (4% (v/v)), glucose (5% (w/v)), EDTA (0.5 mM)), frozen in liquid nitrogen and stored at -80° C. until further use in aliquots of 3 × 1 mL and 7 × 10 mL.

### Cell Cultivation 2

[0400] One preculture (100 mL) was inoculated with the strain E. coli BL 21 Gold (DE3) ΔdkgA :: FRT T7 gdh pETM11-BM3-254 (50 µL) containing the desired plasmids and was shaken at 37° C. and 165 rpm for 16 hours. This preculture (10 mL) was used to inoculate one 1 L Biostat Q fermenter. The cultivation media was prepared in the fermenter. Tryptone (20 g/L), sodium chloride (20 g/L), yeast extract (10 g/L) and Pluronic® PE 8100 (0.5 mL) were dissolved in demineralized water (1.0 L) and sterilized for 30 minutes at 121° C. in the fermenter. Afterwards kanamycin (50 mg) in demineralized water (5 mL) was added. After the inoculation of the fermenter, the inoculated culture was stirred at 500 rpm at 37° C. with an aeration rate of 0.4 L/min and an oxygen partial pressure of 30% was maintained by stirring of up to 1500 rpm. After 3 hours an aqueous glucose solution (25%, 8 g/h) was added. After 5 hours an OD550 of 16.6 was reached, the temperature was decreased to 28° C. within 15 minutes and IPTG (0.24 g) in demineralized water (10 mL) was added to start the protein expression. After additional 9 hours and 15 minutes the cells were harvested by centrifugation (42 g), suspended in buffer (42 mL; KH2PO4 (4 g/L), K2HPO4 (12.3 g/L), glycerol (4% (v/v)), glucose (5% (w/v)), EDTA (0.5 mM)), frozen in liquid nitrogen and stored at -80° C. until further use in aliquots of 3 × 1 mL and 7 × 10 mL.

### Cell Cultivation 3

[0401] One preculture (100 mL) was inoculated with the strain E. coli BL 21 Gold (DE3) ΔdkgA :: FRT T7 gdh pETM11-BM3-254 (50 µL) containing the desired plasmids and was shaken at 37° C. and 165 rpm for 16 hours. This preculture (10 mL) was used to inoculate one 1 L Biostat Q fermenter. The cultivation media was prepared in the fermenter. Tryptone (20 g/L), sodium chloride (20 g/L), yeast extract (10 g/L) and Pluronic® PE 8100 (0.5 mL) were dissolved in demineralized water (1.0 L) and sterilized for 30 minutes at 121° C. in the fermenter. Afterwards kanamycin (50 mg) in demineralized water (5 mL) was added. After the inoculation of the fermenter, the inoculated culture was stirred at 500 rpm at 37° C. with an aeration rate of 0.4 L/min and an oxygen partial pressure of 30% was maintained by stirring of up to 1500 rpm. After 3 hours an aqueous glucose solution (25%, 8 g/h) was added. After 5 hours and 5 minutes an OD550 of 16.72 was reached, the temperature was decreased to 28° C. within 15 minutes and IPTG (0.238 g) in demineralized water (10 mL) and 5-aminolevulinic acid hydrochloride (0.042 g) in demineralized water (5 mL) was added to start the protein expression. After additional 9 hours and 40 minutes the cells were harvested by centrifugation (43 g), suspended in buffer (43 mL; KH2PO4 (4 g/L), K2HPO4 (12.3 g/L), glycerol (4% (v/v)), glucose (5% (w/v)), EDTA (0.5 mM)), frozen in liquid nitrogen and stored at -80° C. until further use in aliquots of 3 × 1 mL and 5 × 15 mL.

### Biotransformation 1

[0402] To a 1 L Biostat Q fermenter which contained KH2PO4 (4 g), K2HPO4 (12.3 g), Pluronic® PE 8100 (0.1 mL), demineralized water (0.93 L), aqueous glucose solution (50%, 20 mL) and aqueous EDTA solution (0.5 M, 1 mL) (17beta)-17-hydroxyandrosta-4-en-3-one (100 mg, 0.35 mmol) dissolved in DMF (5 mL) was added, and the mixture was stirred at 300 rpm at 27° C. with an aeration rate of 0.5 L/min. Cells in buffer (50 mL of preculture 2) were added, and the biotransformation was maintained at an oxygen partial pressure of 50% by varying the stirring rate to up to 800 rpm. The pH value was maintained at pH 7.4 by addition of an aqueous solution of sodium hydroxide (16%). After 4 hours, cells (20 mL) in buffer were added again. After 28 hours and 10 minutes the biotransformation was stopped.

### Biotransformation 2

[0403] To a 1 L Biostat Q fermenter which contained KH2PO4 (4 g), K2HPO4 (12.3 g), Pluronic® PE 8100 (0.1 mL), demineralized water (0.93 L), aqueous glucose solution (50%, 20 mL) and aqueous EDTA solution (0.5 M, 1 mL) (17beta)-17-hydroxyandrosta-4-en-3-one (100 mg, 0.35 mmol) dissolved in DMF (5 mL) was added and the mixture was stirred at 300 rpm at 27° C. with an aeration rate of 0.5 L/min. Cells in buffer (50 mL of cell cultivation 3) were added, and the biotransformation was maintained at an oxygen partial pressure of 50% by varying the stirring rate to up to 800 rpm. The pH value was maintained at pH 7.4 by addition of an aqueous solution of sodium hydroxide (16%). After 27 hours and 45 minutes the biotransformation was stopped.

### Biotransformation 3

[0404] To a 1 L Biostat Q fermenter which contained KH2PO4 (4 g), K2HPO4 (12.3 g), Pluronic® PE 8100 (0.1 mL), demineralized water (0.93 L), aqueous glucose solution (50%, 20 mL) and aqueous EDTA solution (0.5 M, 1 mL). (17beta)-17-hydroxyandrosta-4-en-3-one (4 × 25 mg, 0.35 mmol) dissolved in DMF (4 × 2.5 mL) was added in intervals after 0 h, 2 h, 4 h and 6 h and the mixture was stirred at 300 rpm at 27° C. with an aeration rate of 0.5 L/min. Cells in buffer (50 mL of cell cultivation 1) were added at 0 h, and the biotransformation was maintained at an oxygen partial pressure of 50% by varying the stirring rate between 800 and 1200 rpm. The pH value was maintained at pH 7.4 by addition of an aqueous solution of sodium hydroxide (16%). After 28 hours the biotransformation.

[0405] The three biotransformations were combined and extracted with 4-methyl-2-pentanone. The organic layer was concentrated to give an oil (2.2 g) which was slurried with methanol and was filtered and concentrated to give an oil (1.06 g). The crude product was further purified by flash chromatography using silica gel (dichloromethane/methanol gradient) and by preparative HPLC to give the title compound (7.8 mg, 2% yield).

### Preparative Chiral HPLC Method

[0406] Instrument: Waters Autopurificationsystem; Column: Waters XBrigde C18 5 µ 100×30 mm; Eluent A: water + 0.1 vol-% aqueous ammonia (99%), Eluent B: acetonitrile; gradient: 0.00-0.50 min 10% B (40-70 mL/min), 0.51-5.50 min 10-40% B (70 mL/min), DAD scan: 210-400 nm.

### Analytical Chiral HPLC Method

[0407] Instrument: Waters Acquity UPLCMS SingleQuad; Column: Acquity UPLC BEH C18 1.7 µm, 50×2.1 mm; eluent A: water + 0.1 vol % aqueous ammonia (99%), eluent B: acetonitrile; gradient: 0-1.6 min 1-99% B, 1.6-2.0 min 99% B; flow 0.8 mL/min; temperature: 60° C.; DAD scan: 210-400 nm.

[0408] Analytical Chiral HPLC: Rₜ = 0.73 min.

[0409] ¹H-NMR (600 MHz, CDCl3) δ [ppm]: 0.79 (s, 3H), 0.95 - 1.11 (m, 3H), 1.24 - 1.36 (m, 3H), 1.38 - 1.50 (m, 3H), 1.57 - 1.63 (m, 1H), 1.69 - 1.77 (m, 1H), 1.81 (dq, 1H), 1.87 (dt, 1H), 1.95 - 2.02 (m, 1H), 2.03 - 2.14 (m, 1H), 2.20 - 2.27 (m, 2H), 2.30 (s, 1H), 2.35 - 2.41 (m, 1H), 2.44 - 2.54 (m, 1H), 3.60 - 3.73 (m, 3H), 4.09 - 4.17 (m, 2H).

### Example 21

[0410] 3-hydroxyestra-1 (10),2,4-trien-17-one

[chemical structure]

### Expression System

[0411] E. coli BL21 Star™ (DE3) pETM11-BM3-268; S72G, A74V, F77A

### Cultivation

[0412] Media of the preculture: tryptone (16 g/L), sodium chloride (10 g/L) and yeast extract (10 g/L) in demineralized water. The pH value was maintained at pH 7.3. The medium was sterilized at 121° C. for 20 minutes. Afterwards kanamycin (50 mg/L) was added.

[0413] One preculture (100 mL) was inoculated with the strain E. coli BL21 Star™ (DE3) pETM11-BM3-268; S72G, A74V, F77A (50 µL) containing the desired plasmids and was shaken at 37° C. and 165 rpm for 17 hours. This preculture (100 mL) was used to inoculate one 10 L steel fermenter. The cultivation media were prepared in the fermenter. Tryptone (12 g/L), yeast extract (24 g/L), predigested beef extract (2 g/L), KH2PO4 (2.2 g/L), K2HPO4 (9.4 g/L) and glycerol (87%, 4.6 g/L) were dissolved in demineralized water (9.2 L) and sterilized for 20 minutes at 121° C. in the fermenter. Afterwards kanamycin (0.5 g) in water (20 mL), riboflavin (10 mg) in water (20 mL), thiamine hydrochloride (3.37 g) in water (10 mL) and Oxford trace metal solution (2.5 mL) were added. After the inoculation of the fermenter, the culture was stirred at 315 rpm at 37° C. with an aeration rate of 3.3 L/min at pH 6.6 which was regulated by addition of aqueous sodium hydroxide solution (16%) or aqueous phosphoric acid solution (16%). After 2.55 hours, an OD550 of 0.94 was reached, the temperature was decreased to 27° C. within 10 minutes and IPTG (1.43 g) in water (40 mL) were added to start the protein expression. After 9.15 hours the aqueous phosphoric acid solution (16%) was substituted for an aqueous glucose solution (50%) for pH regulation. After additional 23.5 hours an OD550 of 23.92 was reached, the cells were harvested by centrifugation (215.6 g), suspended in buffer (215.6 mL; KH2PO4 (4 g/L), K2HPO4 (12.3 g/L), glycerol (4% (v/v)), glucose (5% (w/v)), EDTA (0.5 mM)), frozen in liquid nitrogen and stored at -80° C. until further use in aliquots of 1 × 150 mL, 1 × 130 mL, 2 × 40 mL und 5 × 1 mL.

### Biotransformation

[0414] To a 10 L steel fermenter which contained KH2PO4 (40 g), K2HPO4 (123 g), Pluronic® PE 8100 (1 mL), demineralized water (9.0 L), aqueous glucose solution (50%, 200 mL) and aqueous EDTA solution (0.5 M, 10 mL) androsta-1,4-diene-3,17-dione (500 mg, 1.75 mmol) dissolved in DMF (10 mL) was added and the mixture was stirred at 315 rpm at 27° C. with an aeration rate of 3.3 L/min. Cells in buffer (400 mL) were added, and the biotransformation was maintained at an oxygen partial pressure of 50% by varying the stirring rate to up to 1200 rpm. The pH value was maintained at pH 7.4 by addition of an aqueous solution of sodium hydroxide (16%). After 26 hours the biotransformation was extracted with 4-methyl-2-pentanone. The organic layer was concentrated to give an oil (2.37 g) which was slurried with methanol and was filtered and concentrated to give an oil (2.05 g). The crude product was further purified by flash chromatography using silica gel (dichloromethane/methanol gradient) and twice by preparative HPLC to give the title compound (14 mg).

### 1. Preparative HPLC Method

[0415] Instrument: Waters Autopurificationsystem; Column: Waters XBrigde C18 5 µ 50×50 mm; Eluent A: Water + 0.2 Vol-% Formic acid (99%), Eluent B: Acetonitrile; Gradient: 0.00-0.50 min 23% B (50-100 mL/min), 0.51-13.50 min 23 - 43% B (100 mL/min), DAD scan: 210-400 nm.

### 1. Analytical HPLC Method

[0416] Instrument: Waters Acquity UPLCMS SingleQuad; Column: Acquity UPLC BEH C18 1.7 µm, 50×2.1 mm; Eluent A: Water + 0.1 Vol-% Formic acid (99%), Eluent B: Acetonitrile; Gradient: 0-2.6 min 1-99% B, 2.6-3.0 min 99% B; Flow 0.8 mL/min; Temperature: 60° C.; DAD scan: 210-400 nm.

[0417] Analytical HPLC: Rₜ = 1.10 min.

### 2. Preparative HPLC Method

[0418] Instrument: Sepiatec: Prep SFC100; Column: Chiralpak IG 5 µ 250×30 mm; eluent A: CO2; eluent B: methanol; isocratic: 20% B; flow: 100 mL/min; temperature: 40° C.; BPR: 150 bar; UV: 280 nm.

### 2. Analytical HPLC Method

[0419] Instrument: Agilent: 1260, Aurora SFC-Modul; Column: Chiralpak IG 5 µ 100×4.6 mm; eluent A: CO2; eluent B: methanol; isocratic: 20% B; flow: 4 mL/min; temperature: 37.5° C.; BPR: 100 bar; UV: 280 nm.

[0420] Analytical HPLC: Rₜ = 3.66 min.

[0421] ¹H-NMR (400 MHz, DMSO-d6) δ [ppm]: 0.820 (16.00), 1.293 (0.48), 1.322 (0.95), 1.329 (0.75), 1.348 (2.38), 1.371 (1.82), 1.401 (0.24), 1.450 (0.87), 1.461 (0.83), 1.476 (1.50), 1.492 (0.75), 1.523 (0.55), 1.529 (0.44), 1.545 (0.36), 1.552 (0.59), 1.575 (0.36), 1.583 (0.32), 1.726 (0.99), 1.733 (0.91), 1.748 (0.79), 1.754 (0.67), 1.882 (0.51), 1.890 (0.55), 1.896 (0.59), 1.915 (0.75), 1.921 (0.83), 1.935 (0.63), 1.943 (0.67), 1.964 (0.48), 1.976 (0.44), 2.011 (0.59), 2.033 (0.91), 2.058 (0.83), 2.071 (0.20), 2.080 (1.19), 2.102 (0.51), 2.136 (0.55), 2.284 (0.40), 2.301 (0.71), 2.314 (0.71), 2.326 (0.51), 2.331 (0.24), 2.394 (0.95), 2.414 (1.07), 2.440 (0.75), 2.461 (0.95), 2.518 (0.71), 2.522 (0.48), 2.539 (0.44), 2.664 (0.20), 2.669 (0.24), 2.673 (0.20), 2.710 (0.20), 2.735 (1.35), 2.747 (1.43), 2.775 (0.51), 3.298 (0.20), 6.444 (2.06), 6.450 (2.42), 6.496 (1.35), 6.502 (1.07), 6.517 (1.39), 6.523 (1.15), 7.036 (1.82), 7.056 (1.66), 9.033 (4.63).

[0422] ¹H-NMR (400 MHz, DMSO-d6) δ [ppm]: 0.82 (s, 3H), 1.22 - 1.41 (m, 3H), 1.42 - 1.61 (m, 3H), 1.69 - 1.79 (m, 1H), 1.86 - 1.99 (m, 2H), 2.00 - 2.19 (m, 2H), 2.25 - 2.35 (m, 1H), 2.43 (dd, 1H), 2.68 - 2.83 (m, 2H), 6.45 (d, 1H), 6.51 (dd, 1H), 7.05 (d, 1H), 9.03 (s, 1H).

[0423] For another preparation of the title compound see Example 25. The crude product was further purified by flash chromatography using silica gel (dichloromethane/methanol gradient) and by preparative HPLC to give the title compound (91 mg).

[0424] Furthermore the title compound was synthesized using androsta-1,4-diene-3,17-dione (ADD) as a substrate by the following procedures with the screening yields mentioned below.

| BM3 Variant | Biotransformation variant | Substrate concentration (mg/L) | OD550 | pH | Screening yield (%) Example 21 after 23 h |
|---|---|---|---|---|---|
| A | 2 | 400 | 35 | 7.0 | 61 |
| A | 4 | 800 | 44 | 6.6 | 58 |
| A | 3 | 1500 | 210 | 6.6 | 55 |
| B | 1 | 400 | 26 | 6.6 | 29 |
| C | 1 | 400 | 36 | 6.6 | 28 |
| C | 1 | 400 | 28 | 6.6 | 61* |
| D | 2 | 400 | 35 | 7.0 | 7 |
| D | 2 | 400 | 32 | 7.0 | 32 |
| E | 1 | 400 | 34 | 6.6 | 32 |
| F | 1 | 400 | 30 | 6.6 | 48 |
| G | 1 | 400 | 36 | 6.6 | 66 |
| H | 1 | 400 | 29 | 6.6 | 46 |
| I | 1 | 400 | 34 | 6.6 | 60 |

*after 47 h cultivation

### Expression Systems

[0425] A: E. coli BL21 Star™ (DE3) pETM11-BM3-268; M177Y, A184Y (Prot Seq ID No. 15; DNA Seq ID No. 73) + S72G, V178P, L181Y, L188F

[0426] B: E. coli BL21 Star™ (DE3) pETM11-BM3-268; M177Y, A184Y (Prot Seq ID No. 15; DNA Seq ID No. 73) + S72G, T146F, V178W, L181Y

[0427] C: E. coli BL21 Star™ (DE3) pETM11-BM3-268; S72G, M177Y, V178P, L181Y, A184Y, L188F (Prot SEQ ID No. 117; DNA Seq ID No. 120) + R179L

[0428] D: E. coli BL21 Star™ (DE3) pETM11-BM3-268; S72G, M177Y, V178P, L181Y, A184Y, L188F (Prot SEQ ID No. 117; DNA Seq ID No. 120)

[0429] E: E. coli BL21 Star™ (DE3) pETM11-BM3-268; S72G, T146F, M177Y, V178W, L181Y, A184Y, G457S, 1458G, A477N (Prot SEQ ID No. 119; DNA-Seq ID No. 122)

[0430] F: E. coli BL21 Star™ (DE3) pETM11-BM3-268; S72G, T146F, M177Y, V178W, L181Y, A184Y, G457S, 1458G, A477N (Prot SEQ ID No. 119; DNA-Seq ID No. 122) + insert with SEQ ID No. 137

[0431] G: E. coli BL21 Star™ (DE3) pETM11-BM3-268; S72G, T146F, M177Y, V178W, L181Y, A184Y, G457S, 1458G, A477N (Prot SEQ ID No. 119; DNA-Seq ID No. 122) + insert with SEQ ID No. 126

[0432] H: E. coli BL21 Star™ (DE3) pETM11-BM3-268; S72G, T146F, M177Y, V178W, L181Y, A184Y, G457S, 1458G, A477N (Prot SEQ ID No. 119; DNA-Seq ID No. 122) + insert with Seq ID No. 139

[0433] I: E. coli BL21 Star™ (DE3) pETM11-BM3-268; S72G, T146F, M177Y, V178W, L181Y, A184Y, G457S, 1458G, A477N (Prot SEQ ID No. 119; DNA-Seq ID No. 122) + insert with SEQ ID No. 145

[0434] Media of the preculture: tryptone (16 g/L), sodium chloride (10 g/L) and yeast extract (10 g/L) in demineralized water. The pH value was maintained at pH 7.3. The medium was sterilized at 121° C. for 20 minutes. Afterwards kanamycin (50 mg/L) was added.

[0435] One preculture (100 mL) was inoculated with the strain (50 µL) containing the desired plasmids and was shaken at 37° C. and 165 rpm for 17 hours. This preculture (100 mL) was used to inoculate one 10 L steel fermenter. The cultivation media were prepared in the fermenter. Tryptone (12 g/L), yeast extract (24 g/L), predigested beef extract (2 g/L), KH2PO4 (2.2 g/L), K2HPO4 (9.4 g/L) and glycerol (87%, 4.6 g/L) were dissolved in demineralized water (9.2 L) and sterilized for 20 minutes at 121° C. in the fermenter. Afterwards kanamycin (0.5 g) in water (20 mL), riboflavin (10 mg) in water (20 mL), thiamine hydrochloride (3.37 g) in water (10 mL) and Oxford trace metal solution (2.5 mL) were added. After the inoculation of the fermenter, the culture was stirred at 315 rpm at 37° C. with an aeration rate of 3.3 L/min at pH 6.6 which was regulated by addition of aqueous sodium hydroxide solution (16%) or aqueous phosphoric acid solution (16%). After an OD550 of 0.9-1.0 was reached, the temperature was decreased to 27° C. within 10 minutes and IPTG (1.43 g) in water (40 mL) was added to start the protein expression. The aqueous phosphoric acid solution (16%) was substituted for an aqueous glucose solution (50%) for pH regulation after the time described in the table below. After the culturing time mentioned in the table below the cells were harvested by centrifugation and resuspended in buffer, 1 g cell pellet in 1 mL buffer (KH2PO4 (4 g/L), K2HPO4 (12.3 g/L), glycerol (4% (v/v)), glucose (5% (w/v)), EDTA (0.5 mM)), frozen in liquid nitrogen and stored at -80° C. until further use in aliquots of 80 mL.

| Variant | culturing time (h) | time of phosphoric acid Glucose switch (h) |
|---|---|---|
| A | 24 | 12.3 |
| A | 48 | 12.0 |
| A | 48 | 12.0 |
| B | 31 | 23.5 |
| C | 24 | 14.3 |
| C | 48 | 14.0 |
| D | 24 | 14.5 |
| D | 31 | 24.5 |
| E | 48 | 9.3 |
| F | 48 | 11.3 |
| G | 48 | 9.8 |
| H | 48 | 14.0 |
| I | 48 | 9.5 |

### Biotransformation 1

[0436] To a 1 L glass vessel fermenter which contained KH2PO4 (9.54 g), K2HPO4 (5.19 g), 0.1 mL of Pluronic® PE 8100, demineralized water (0.9 L), aqueous glucose solution (50%, 20 mL) and aqueous EDTA solution (0.5 mM, 1 mL), androsta-1,4-diene-3,17-dione (400 mg, 1.41 mmol/L) dissolved in DMF (8 mL) was added and the mixture was stirred at 300 rpm at 27° C. with an aeration rate of 0.5 L/min. Cells in buffer (80 mL) were added, and the biotransformation was maintained at a dissolved oxygen partial pressure of 50% by varying the stirring rate up to 2000 rpm. After Glucose concentration dropped below 5 g/L an aqueous glucose solution (50%) feeding started. The pH value was maintained at pH 6.6 by addition of an aqueous solution of sodium hydroxide (16%). After 0 h, 1 h, 2 h, 3 h, 5 h, 7 h, 23 h and 47 h an analytical sample (2 mL) was taken and the titer for Example 21 was measured with the methods mentioned below.

| Variant | Start Glucose feeding (h) | total quantity Glucose (g) |
|---|---|---|
| B | 3 | 68.5 |
| C | 3 | 66.7 |
| C | 7 | 25.1 |
| E | 5 | 51.7 |
| F | 5 | 70.6 |
| G | 5 | 70.9 |
| H | 1 | 61.2 |
| I | 7 | 63.9 |

### Biotransformation 2

[0437] To a 1 L glass vessel fermenter which contained KH2PO4 (6.8 g), K2HPO4 (8.7 g), 0.1 mL of Pluronic® PE 8100, demineralized water (0.9 L), aqueous glucose solution (50%, 20 mL) and aqueous EDTA solution (0.5 mM, 1 mL), androsta-1,4-diene-3,17-dione (400 mg, 1.41 mmol/L) dissolved in DMF (8 mL) was added and the mixture was stirred at 300 rpm at 27° C. with an aeration rate of 0.5 L/min. Cells in buffer (80 mL) were added, and the biotransformation was maintained at a dissolved oxygen partial pressure of 50% by varying the stirring rate up to 2000 rpm. After the glucose concentration dropped below 5 g/L an aqueous glucose solution (50%) feeding started. The pH value was maintained at pH 7.0 by addition of an aqueous solution of sodium hydroxide (16 %). After 0 h, 1 h, 2 h, 3 h, 5h, 7 h and 23 h an analytical sample (2 mL) was taken and the titer for Example 21 was measured with methods mentioned below.

| Variant | Start Glucose feeding (h) | total quantity Glucose (g) |
|---|---|---|
| A | 7 | no data |
| D | 5 | 79 |
| D | 5 | 66.3 |

### Biotransformation 3

[0438] To a 1 L glass vessel fermenter which contained KH2PO4 (9.54 g), K2HPO4 (5.19 g), 0.1 mL of Pluronic® PE 8100, demineralized water (0.5 L), aqueous glucose solution (50%, 20 mL), 20 mL of DMF and aqueous EDTA solution (0.5 mM, 1 mL), androsta-1,4-diene-3,17-dione (1500 mg, 5.27 mmol/L) as aqueous suspension was added (15.4 mL of an 125 g/L stock solution; 78%) and the mixture was stirred at 500 rpm at 27° C. with an aeration rate of 0.5 L/min. Cells in buffer (400 mL) were added, and the biotransformation was maintained at an dissolved oxygen partial pressure of 50% by varying the stirring rate up to 2000 rpm and addition of pure oxygen to aeration within the range of 0.4 L/min and reducing air aeration by the same volume per minute to keep aeration rate of 0.5 L/min. After 3 hours an aqueous glucose solution (50%) feeding started. The amount of glucose measured should not drop below 5 g/L. The total amount of added glucose was 97.9 g. The pH value was maintained at pH 6.6 by addition of an aqueous solution of sodium hydroxide (16 %). After 0 h, 1 h, 2 h, 3 h, 5 h, 7 h and 23 h an analytical sample (2 mL) was taken and the titer for Example 21 was measured with methods mentioned below.

### Biotransformation 4

[0439] To a 1 L glass vessel fermenter which contained KH2PO4 (9.54 g), K2HPO4 (5.19 g), 0.1 mL of Pluronic® PE 8100, demineralized water (0.9 L), aqueous glucose solution (50%, 20 mL) and aqueous EDTA solution (0.5 mM, 1 mL), androsta-1,4-diene-3,17-dione (800 mg, 2.81 mmol/L) dissolved in DMF (16 mL) was added and the mixture was stirred at 300 rpm at 27° C. with an aeration rate of 0.5 L/min. Cells in buffer (80 mL) were added, and the biotransformation was maintained at a dissolved oxygen partial pressure of 50% by varying the stirring rate up to 2000 rpm. After 23 hours an aqueous glucose solution (50%) feeding started. The amount of glucose measured should not drop below 5 g/L. The total amount of added glucose was 67.5 g. The pH value was maintained at pH 6.6 by addition of an aqueous solution of sodium hydroxide (16%). After 0 h, 1 h, 2 h, 3 h, 5 h, 7 h and 23 h an analytical sample (2 mL) was taken and the titer for Example 21 was measured with methods mentioned below.

### Analytical HPLC Method

[0440] Instrument: Waters Acquity UPLC (I-Class, H-Class) or Thermo Scientific ISQ EM SingleQuad; Column: Ascentis Express C18 2.7 µm, 150×2.1 mm; Eluent A: Water + 0.05 % Formic acid (99%); Eluent B: Acetonitrile + 0.05% Formic acid; Gradient: 0-9 min 5-30% B, 9-15 min 30-95% B; Flow 0.7 mL/min; Temperature: 45° C.; DAD: 243 nm + 280 nm.

### Example 22

[0441] 15alpha-hydroxyandrosta-1,4-diene-3, 17 -dione

[chemical structure]

[0442] For the preparation of the title compound see Example 21. The crude product was further purified by flash chromatography using silica gel (dichloromethane/methanol gradient) and twice by preparative HPLC to give the title compound (14 mg).

### 1. Preparative HPLC Method

[0443] Instrument: Waters Autopurificationsystem; Column: Waters XBrigde C18 5 µ 50×50 mm; Eluent A: Water + 0.1 Vol-% Formic acid (99%), Eluent B: Acetonitrile; Gradient: 0.00-0.50 min 17% B (50-100 mL/min), 0.51-8.50 min 17 - 37% B (100 mL/min), DAD scan: 210-400 nm.

### 1. Analytical HPLC Method

[0444] Instrument: Waters Acquity UPLCMS SingleQuad; Column: Acquity UPLC BEH C18 1.7 µm, 50×2.1 mm; Eluent A: Water + 0.1 Vol-% Formic acid (99 %), Eluent B: Acetonitrile; Gradient: 0-2.6 min 1-99% B, 2.6-3.0 min 99% B; Flow 0.8 mL/min; Temperature: 60° C.; DAD scan: 210-400 nm.

[0445] Analytical HPLC: Rₜ = 0.82 min.

### 2. Preparative HPLC Method

[0446] Instrument: PrepCon Labomatic HPLC; Column: YMC Cellulose SC 5 µ, 250×30 mm; eluent A: hexane + 0.1 vol % diethylamine; eluent B: 2-propanol; isocratic: 70 % A + 30 % B; flow: 50 mL/min; temperature: 25° C.; UV: 254 nm.

### 2. Analytical HPLC Method

[0447] Instrument: Waters Alliance 2695; Column: YMC Cellulose SC 3 µ, 100×4.6 mm; eluent A: hexane + 0.1 vol % diethylamine; eluent B: 2-propanol; isocratic: 70% A + 30% B; flow: 1.4 mL/min; temperature: 25° C.; UV: 254 nm.

[0448] Analytical HPLC: Rₜ = 9.28 min.

[0449] ¹H-NMR (600 MHz, CDCl3) δ [ppm]: 0.000 (2.45), 0.736 (0.49), 0.839 (0.64), 0.848 (0.52), 0.856 (0.53), 0.862 (0.46), 0.869 (0.88), 0.881 (1.19), 0.892 (0.62), 1.071 (0.16), 1.139 (0.57), 1.146 (0.65), 1.157 (0.67), 1.159 (0.78), 1.163 (0.80), 1.166 (0.69), 1.177 (0.65), 1.184 (0.62), 1.189 (0.46), 1.197 (0.55), 1.210 (0.78), 1.217 (0.88), 1.233 (1.06), 1.239 (1.17), 1.254 (5.41), 1.262 (3.03), 1.270 (14.17), 1.281 (2.20), 1.288(1.62), 1.297 (1.04), 1.306 (16.00), 1.333 (0.30), 1.348 (0.42), 1.356 (0.21), 1.376 (0.22), 1.399 (0.16), 1.412 (0.17), 1.601 (0.17), 1.642 (0.51), 1.700 (0.19), 1.724 (0.23), 1.731 (0.33), 1.747 (0.53), 1.753 (0.50), 1.768 (0.70), 1.774 (0.62), 1.789 (0.32), 1.796 (0.33), 1.840 (0.70), 1.844 (1.02), 1.851 (1.63), 1.858 (0.95), 1.861 (0.97), 1.866 (1.73), 1.868 (1.14), 1.873 (1.06), 1.877 (0.57), 1.884 (0.28), 2.163 (0.24), 2.169 (0.28), 2.181 (0.55), 2.187 (0.64), 2.201 (0.54), 2.206 (0.60), 2.219 (0.21), 2.225 (0.26), 2.267 (0.30), 2.271 (0.41), 2.276 (0.50), 2.280 (0.46), 2.288 (0.41), 2.292 (0.42), 2.297 (0.46), 2.301 (0.44), 2.307 (0.28), 2.434 (0.41), 2.438 (0.48), 2.441 (0.51), 2.445 (0.42), 2.456 (0.59), 2.461 (0.67), 2.463 (0.68), 2.468 (0.52), 2.503 (0.69), 2.513 (0.64), 2.535 (1.79), 2.545 (1.79), 2.567 (0.41), 2.569 (0.53), 2.575 (2.58), 2.590 (0.64), 2.592 (0.66), 2.598 (0.63), 2.600 (0.64), 2.607 (0.88), 2.612 (0.34), 2.614 (0.31), 2.621 (0.27), 2.623 (0.37), 4.576 (0.66), 4.585 (1.06), 4.593 (0.65), 6.107 (1.41), 6.109 (2.45), 6.112 (1.50), 6.245 (1.70), 6.248 (1.64), 6.262 (1.64), 6.266 (1.59), 7.060 (2.35), 7.078 (2.17), 7.267 (8.94).

### Example 23

[0450] 6beta-hydroxyandrosta-1 ,4-diene-3, 17 -dione

[chemical structure]

[0451] For the preparation of the title compound see Example 21. The crude product was further purified by flash chromatography using silica gel (dichloromethane/methanol gradient) and twice by preparative HPLC to give the title compound (2 mg).

### 1. Preparative HPLC Method

[0452] Instrument: Waters Autopurificationsystem; Column: Waters XBrigde C18 5 µ 50x50 mm; Eluent A: Water + 0.1 Vol-% Formic acid (99%), Eluent B: Acetonitrile; Gradient: 0.00-0.50 min 17 % B (50-100 mL/min), 0.51-8.50 min 17 - 37% B (100 mL/min), DAD scan: 210-400 nm.

### 1. Analytical HPLC Method

[0453] Instrument: Waters Acquity UPLCMS SingleQuad; Column: Acquity UPLC BEH C18 1.7 µm, 50×2.1 mm; Eluent A: Water + 0.1 Vol-% Formic acid (99%), Eluent B: Acetonitrile; Gradient: 0-2.6 min 1-99% B, 2.6-3.0 min 99% B; Flow 0.8 mL/min; Temperature: 60° C.; DAD scan: 210-400 nm.

[0454] Analytical HPLC: Rₜ = 0.82 min.

### 2. Preparative HPLC Method

[0455] Instrument: PrepCon Labomatic HPLC; Column: YMC Cellulose SC 5 µ, 250×30 mm; eluent A: hexane + 0.1 vol % diethylamine; eluent B: 2-propanol; isocratic: 70 % A + 30 % B; flow: 50 mL/min; temperature: 25° C.; UV: 254 nm.

### 2. Analytical HPLC Method

[0456] Instrument: Waters Alliance 2695; Column: YMC Cellulose SC 3 µ, 100×4.6 mm; eluent A: hexane + 0.1 vol % diethylamine; eluent B: 2-propanol; isocratic: 70% A + 30% B; flow: 1.4 mL/min; temperature: 25° C.; UV: 254 nm.

[0457] Analytical HPLC: Rₜ = 6.58 min.

[0458] ¹H-NMR (400 MHz, DMSO-d6) δ [ppm]: 0.697 (1.62), 0.717 (0.16), 0.833 (0.65), 0.851 (1.06), 0.879 (16.00), 0.986 (0.57), 0.996 (0.57), 1.014 (0.89), 1.023 (0.97), 1.042 (0.73), 1.052 (0.65), 1.083 (0.32), 1.147 (0.65), 1.164 (1.06), 1.172 (0.89), 1.184 (1.38), 1.195 (1.87), 1.232 (5.28), 1.256 (1.38), 1.272 (1.06), 1.289 (1.38), 1.293 (1.46), 1.300 (1.22), 1.317 (0.97), 1.330 (0.97), 1.347 (0.65), 1.351 (0.65), 1.373 (16.00), 1.472 (0.41), 1.495 (0.81), 1.502 (0.65), 1.517 (0.57), 1.526 (1.14), 1.534 (0.57), 1.548 (0.73), 1.557 (0.65), 1.579 (0.32), 1.598 (0.32), 1.609 (0.41), 1.631 (0.65), 1.641 (0.81), 1.668 (2.60), 1.692 (0.89), 1.698 (1.22), 1.708 (0.65), 1.784 (0.73), 1.795 (0.81), 1.805 (0.57), 1.822 (0.65), 1.833 (0.81), 1.847 (0.65), 1.853 (0.73), 1.867 (0.73), 1.883 (0.57), 1.898 (0.49), 1.959 (0.81), 1.967 (0.81), 1.975 (1.22), 1.981 (1.71), 2.006 (1.46), 2.017 (0.73), 2.028 (1.38), 2.051 (0.49), 2.080 (0.32), 2.089 (0.32), 2.109 (0.73), 2.116 (0.65), 2.138 (0.73), 2.165 (0.32), 2.173 (0.24), 2.331 (0.97), 2.336 (0.49), 2.380 (1.14), 2.401 (1.14), 2.428 (1.30), 2.450 (1.79), 2.518 (3.65), 2.522 (2.44), 2.539 (0.49), 2.673 (0.89), 2.678 (0.41), 4.398 (1.71), 4.405 (1.71), 5.331 (2.27), 5.336 (2.19), 6.054 (3.49), 6.058 (4.30), 6.084 (2.60), 6.089 (1.79), 6.109 (2.36), 6.114 (1.95), 7.168 (3.17), 7.193 (3.09).

### Example 24

[0459] 16beta-hydroxyandrosta-1 ,4-diene-3, 17 -dione

[chemical structure]

### Expression System

[0460] E. coli BL21 Star™ (DE3) pETM11-BM3-268; F77A, M177Y

### Cultivation

[0461] Media of the preculture: tryptone (10 g/L), sodium chloride (10 g/L) and yeast extract (5 g/L) in demineralized water. The media was sterilized at 121° C. for 20 minutes. Afterwards kanamycin (50 mg/L) was added.

[0462] One preculture (100 mL) was inoculated with the strain E. coli BL21 Star™ (DE3) pETM11-BM3-268; F77A, M177Y (50 µL) containing the desired plasmids and was shaken at 37° C. and 165 rpm for 17 hours. This preculture (100 mL) was used to inoculate one 10 L steel fermenter. The cultivation media were prepared in the fermenter. Tryptone (12 g/L), yeast extract (24 g/L), predigested beef extract (2 g/L), KH2PO4 (2.2 g/L), K2HPO4 (9.4 g/L) and glycerol (87%, 4.6 g/L) were dissolved in demineralized water (9.2 L) and sterilized for 20 minutes at 121° C. in the fermenter. Afterwards kanamycin (0.5 g) in water (20 mL), riboflavin (10 mg) in water (20 mL), thiamine hydrochloride (3.37 g) in water (10 mL) and Oxford trace metal solution (2.5 mL) were added. After the inoculation of the fermenter, the culture was stirred at 315 rpm at 37° C. with an aeration rate of 3.3 L/min at pH 6.6 which was regulated by addition of aqueous sodium hydroxide solution (16%) or aqueous phosphoric acid solution (16%). After 3.15 hours, an OD550 of 1.0 was reached, the temperature was decreased to 27° C. within 10 minutes and IPTG (1.43 g) in water (40 mL) were added to start the protein expression. After 8 hours the aqueous phosphoric acid solution (16%) was substituted for an aqueous glucose solution (50%) for pH regulation. After additional 24 hours an OD550 of 25.2 was reached, the cells were harvested by centrifugation (284.2 g), suspended in buffer (284.2 mL; KH2PO4 (4 g/L), K2HPO4 (12.3 g/L), glycerol (4% (v/v)), glucose (5% (w/v)), EDTA (0.5 mM)), frozen in liquid nitrogen and stored at -80° C. until further use in aliquots of 2 × 150 mL, 1 × 140 mL, 2 × 40 mL und 5 × 1 mL.

### Biotransformation

[0463] To a 10 L steel fermenter which contained KH2PO4 (40 g), K2HPO4 (123 g), Pluronic® PE 8100 (1 mL), demineralized water (9.0 L), aqueous glucose solution (50 %, 200 mL) and aqueous EDTA solution (0.5 M, 10 mL) androsta-1,4-diene-3,17-dione (500 mg, 1.75 mmol) dissolved in DMF (10 mL) was added and the mixture was stirred at 315 rpm at 27° C. with an aeration rate of 3.3 L/min. Cells in buffer (400 mL) were added, and the biotransformation was maintained at an oxygen partial pressure of 50% by varying the stirring rate to up to 1200 rpm. The pH value was maintained at pH7.4 by addition of an aqueous solution of sodium hydroxide (16%). After 26 hours the biotransformation was extracted with 4-methyl-2-pentanone. The organic layer was concentrated to give an oil (1.71 g) which was slurried with methanol and was filtered and concentrated to give an oil (1.55 g). The crude product was further purified by flash chromatography using silica gel (dichloromethane/methanol gradient) and by preparative HPLC to give the title compound (11 mg).

### Preparative HPLC Method

[0464] Instrument: Sepiatec: Prep SFC100; Column: Reprosil Chiral NR 8µ 250x30 mm; eluent A: CO2; eluent B: 2-propanol; isocratic: 25% B; flow: 100 mL/min; temperature: 40° C.; BPR: 150 bar; UV: 254 nm.

### Analytical HPLC Method

[0465] Instrument: Agilent: 1260, Aurora SFC-Modul; Column: Reprosil Chiral NR 5 µ 100×4.6 mm; eluent A: CO2; eluent B: 2-propanol; isocratic: 25% B; flow: 4 mL/min; temperature: 37.5° C.; BPR: 100 bar; UV: 254 nm.

[0466] Analytical HPLC: Rₜ = 3.41 min.

[0467] ¹H-NMR (600 MHz, CDCl3) δ [ppm]: 0.000 (2.08), 1.032 (13.48), 1.117 (0.25), 1.124 (0.30), 1.129 (0.47), 1.137 (0.99), 1.147 (0.90), 1.150 (0.65), 1.154 (0.70), 1.157 (0.93), 1.168 (0.97), 1.175 (0.53), 1.180 (0.33), 1.188 (0.30), 1.222 (0.50), 1.230 (0.53), 1.237 (0.38), 1.239 (0.59), 1.244 (0.71), 1.248 (0.70), 1.252 (0.83), 1.256 (0.66), 1.262 (0.78), 1.272 (16.00), 1.322 (0.38), 1.330 (0.43), 1.337 (0.26), 1.344 (0.81), 1.351 (0.86), 1.366 (0.46), 1.373 (0.45), 1.558 (0.71), 1.573 (0.73), 1.578 (0.78), 1.580 (0.67), 1.593 (0.82), 1.596 (0.70), 1.600 (0.71), 1.616 (0.71), 1.723 (0.35), 1.730 (0.38), 1.745 (0.66), 1.752 (0.68), 1.767 (0.71), 1.774 (0.75), 1.788 (0.35), 1.796 (0.36), 1.850 (0.36), 1.854 (0.71), 1.857 (0.73), 1.861 (0.91), 1.869 (0.48), 1.872 (0.82), 1.879 (0.99), 1.884 (0.55), 1.892 (0.77), 1.897 (0.59), 1.909 (0.25), 1.916 (0.27), 1.928 (0.59), 1.933 (0.66), 1.935 (0.65), 1.940 (0.51), 1.950 (0.57), 1.954 (0.62), 1.957 (0.60), 1.961 (0.46), 2.073 (0.30), 2.077 (0.40), 2.081 (0.47), 2.083 (0.44), 2.085 (0.44), 2.092 (0.39), 2.099 (0.40), 2.102 (0.44), 2.104 (0.43), 2.113 (0.27), 2.380 (0.61), 2.388 (0.62), 2.393 (0.63), 2.400 (0.80), 2.408 (0.60), 2.413 (0.59), 2.422 (0.84), 2.426 (0.51), 2.430 (0.43), 2.441 (0.67), 2.446 (0.73), 2.448 (0.72), 2.453 (0.59), 2.504 (0.41), 2.507 (0.45), 2.512 (0.45), 2.515 (0.44), 2.526 (0.65), 2.529 (0.66), 2.535 (0.65), 2.538 (0.61), 2.549 (0.29), 2.552 (0.31), 2.557 (0.27), 2.560 (0.25), 2.623 (5.61), 3.948 (1.17), 3.962 (1.59), 3.977 (1.10), 6.101 (1.45), 6.103 (2.45), 6.107 (1.46), 6.241 (1.54), 6.244 (1.48), 6.258 (1.70), 6.262 (1.62), 7.031 (2.46), 7.048 (2.39), 7.266 (8.11).

[0468] ¹H-NMR (600 MHz, CDCl3) δ [ppm]: 1.03 (s, 3H), 1.11 - 1.20 (m, 2H), 1.21 - 1.28 (m, 1H), 1.27 (s, 3H), 1.31 - 1.38 (m, 1H), 1.59 (ddd, 1H), 1.76 (qd, 1H), 1.84 - 1.97 (m, 3H), 2.06 - 2.12 (m, 1H), 2.37 - 2.46 (m, 2H), 2.50 - 2.57 (m, 1H), 2.78 (s, 1H), 3.96 (t, 1H), 6.10 (t, 1H), 6.25 (dd, 1H), 7.04 (d, 1H).

### Example 25

[0469] 3,16beta-dihydroxyestra-1 (10),2,4-trien-17-one

[chemical structure]

### Cultivation

[0470] Media of the preculture: tryptone (16 g/L), sodium chloride (10 g/L) and yeast extract (10 g/L) in demineralized water. The pH value was maintained at pH 7.3. The medium was sterilized at 121° C. for 20 minutes. Afterwards kanamycin (50 mg/L) was added.

[0471] Cell cultivation 1: One preculture (100 mL) was inoculated with the strain E. coli BL21 Star™ (DE3) pETM11-BM3-268; M177Y, A184Y, S72G, V178P, L181Y, L188F (50 µL) containing the desired plasmids and was shaken at 37° C. and 165 rpm for 17 hours. This preculture (100 mL) was used to inoculate one 10 L steel fermenter. The cultivation media was prepared in the fermenter. Tryptone (12 g/L), yeast extract (24 g/L), predigested beef extract (2 g/L), KH2PO4 (2.2 g/L), K2HPO4 (9.4 g/L) and glycerol (87%, 4.6 g/L) were dissolved in demineralized water (9.2 L) and sterilized for 20 minutes at 121° C. in the fermenter. Afterwards kanamycin (0.5 g) in water (20 mL), riboflavin (10 mg) in water (20 mL), thiamine hydrochloride (3.37 g) in water (10 mL) and Oxford trace metal solution (2.5 mL) were added. After the inoculation of the fermenter, the culture was stirred at 315 rpm at 37° C. with an aeration rate of 3.3 L/min at pH 6.6 which was regulated by addition of aqueous sodium hydroxide solution (16%) or aqueous phosphoric acid solution (16%). After 4 hours, an OD550 of 0.7 was reached, the temperature was decreased to 27° C. within 10 minutes and IPTG (1.43 g) in water (40 mL) were added to start the protein expression. After 9.50 hours the aqueous phosphoric acid solution (16%) was substituted for an aqueous glucose solution (50%) for pH regulation. After additional 24 hours an OD550 of 19.6 was reached, the cells were harvested by centrifugation (194.4 g), suspended in buffer (194.4 mL; KH2PO4 (4 g/L), K2HPO4 (12.3 g/L), glycerol (4% (v/v)), glucose (5% (w/v)), EDTA (0.5 mM)), frozen in liquid nitrogen and stored at -80° C. until further use in aliquots of 1 × 150 mL, 1 × 100 mL, 2 × 40 mL und 5 × 1 mL.

[0472] Cell cultivation 2: One preculture (100 mL) was inoculated with the strain E. coli BL21 Star™ (DE3) pETM11-BM3-268; M177Y, A184Y, S72G, V178P, L181Y, L188F (50 µL) containing the desired plasmids and was shaken at 37° C. and 165 rpm for 17 hours. This preculture (100 mL) was used to inoculate one 10 L steel fermenter. The cultivation media was prepared in the fermenter. Tryptone (12 g/L), yeast extract (24 g/L), predigested beef extract (2 g/L), KH2PO4 (2.2 g/L), K2HPO4 (9.4 g/L) and glycerol (87%, 4.6 g/L) were dissolved in demineralized water (9.2 L) and sterilized for 20 minutes at 121° C. in the fermenter. Afterwards kanamycin (0.5 g) in water (20 mL), riboflavin (10 mg) in water (20 mL), thiamine hydrochloride (3.37 g) in water (10 mL) and Oxford trace metal solution (2.5 mL) were added. After the inoculation of the fermenter, the culture was stirred at 315 rpm at 37° C. with an aeration rate of 3.3 L/min at pH 6.6 which was regulated by addition of aqueous sodium hydroxide solution (16%) or aqueous phosphoric acid solution (16%). After 3.55 hours, an OD550 of 0.69 was reached, the temperature was decreased to 27° C. within 10 minutes and IPTG (1.43 g) in water (40 mL) were added to start the protein expression. After 9 hours the aqueous phosphoric acid solution (16%) was substituted for an aqueous glucose solution (50%) for pH regulation. After additional 24 hours an OD550 of 27.75 was reached, the cells were harvested by centrifugation (231 g), suspended in buffer (231 mL; KH2PO4 (4 g/L), K2HPO4 (12.3 g/L), glycerol (4% (v/v)), glucose (5% (w/v)), EDTA (0.5 mM)), frozen in liquid nitrogen and stored at -80° C. until further use in aliquots of 2 × 150 mL, 1 × 50 mL, 2 × 40 mL und 5 × 1 mL.

### Biotransformation

[0473] To a 10 L steel fermenter which contained KH2PO4 (40 g), K2HPO4 (123 g), Pluronic® PE 8100 (1 mL), demineralized water (9.0 L), aqueous glucose solution (50 %, 200 mL) and aqueous EDTA solution (0.5 M, 10 mL) androsta-1,4-diene-3,17-dione (500 mg, 1.75 mmol) dissolved in DMF (10 mL) was added and the mixture was stirred at 315 rpm at 27° C. with an aeration rate of 3.3 L/min. Cells in buffer (330 mL of cell cultivation 1 and 150 ml of cell cultivation 2) were added, and the biotransformation was maintained at an oxygen partial pressure of 50% by varying the stirring rate to up to 1200 rpm. The pH value was maintained at pH 7.4 by addition of an aqueous solution of sodium hydroxide (16%). After 4 hours the biotransformation was extracted with 4-methyl-2-pentanone. The organic layer was concentrated to give an oil (5.65 g) which was dissolved in methanol, and was concentrated to give an oil (3.73 g).

[0474] The crude product was further purified by flash chromatography using silica gel (dichloromethane/ethanol gradient) and by preparative HPLC to give the title compound (54 mg).

### Preparative HPLC Method

[0475] Instrument: Waters Autopurificationsystem; Column: XBrigde C18 5 µ, 100×30 mm; eluent A: water + 0.1 vol % formic acid; eluent B: acetonitrile; gradient: 0.0-0.5 min 23 % B (35-70 mL/min), 0.5-5.5 min 23-58% B; flow: 70 mL/min; temperature: 25° C.; DAD scan: 210-400 nm.

### Analytical HPLC Method

[0476] Instrument: Waters Acquity UPLCMS SingleQuad; Column: Acquity UPLC BEH C18 1.7 µ, 50×2.1 mm; eluent A: water + 0.1 vol % formic acid; eluent B: acetonitrile; gradient: 0-2.6 min 1-99% B, 2.6-3.0 min 99% B; flow: 0.8 mL/min; temperature: 60° C.; DAD scan: 210-400 nm.

[0477] Analytical HPLC: Rₜ = 0.84 min.

[0478] ¹H-NMR (600 MHz, Pyridin-d5) δ [ppm]: 1.04 (s, 3H), 1.28 - 1.41 (m, 2H), 1.45 - 1.62 (m, 3H), 1.75 (ddd, 1H), 1.86 - 1.93 (m, 1H), 1.98 - 2.08 (m, 1H), 2.21 - 2.27 (m, 1H), 2.28 - 2.36 (m, 1H), 2.45 - 2.53 (m, 1H), 2.80 - 2.92 (m, 2H), 4.30 (t, 1H), 7.03 (d, 1H), 7.11 (dd, 1H), 7.28 (d, 1H), 7.91 (s, 1H), 11.24 (s, 1H).

[0479] ¹H-NMR (600 MHz, Pyridin-d5) δ [ppm]: -0.002 (1.01), 0.000 (2.61), 0.965 (0.35), 1.038 (16.00), 1.292 (0.33), 1.303 (0.42), 1.313 (0.94), 1.323 (1.00), 1.333 (1.12), 1.344 (1.18), 1.353 (0.90), 1.355 (0.90), 1.365 (1.11), 1.370 (1.07), 1.374 (1.06), 1.378 (0.87), 1.388 (0.84), 1.396 (0.76), 1.461 (0.25), 1.467 (0.28), 1.483 (0.83), 1.489 (0.69), 1.504 (1.07), 1.508 (1.19), 1.524 (2.72), 1.539 (1.21), 1.545 (1.23), 1.553 (0.73), 1.557 (0.76), 1.561 (0.70), 1.571 (1.25), 1.574 (1.22), 1.590 (1.08), 1.593 (1.04), 1.608 (0.40), 1.612 (0.36), 1.722 (0.73), 1.737 (0.96), 1.741 (1.08), 1.744 (0.91), 1.757 (1.08), 1.759 (0.97), 1.764 (0.84), 1.779 (0.67), 1.875 (0.85), 1.881 (0.87), 1.886 (0.98), 1.890 (0.83), 1.896 (0.93), 1.901 (0.84), 1.907 (0.81), 2.007 (0.29), 2.026 (1.65), 2.031 (1.03), 2.042 (1.15), 2.046 (1.18), 2.051 (0.70), 2.224 (0.72), 2.241 (1.12), 2.253 (0.50), 2.260 (0.54), 2.302 (1.04), 2.313 (0.84), 2.317 (0.78), 2.324 (1.11), 2.329 (1.01), 2.474 (0.74), 2.482 (0.89), 2.487 (0.99), 2.494 (1.19), 2.502 (0.94), 2.506 (0.82), 2.515 (0.68), 2.813 (0.44), 2.823 (0.52), 2.841 (1.32), 2.849 (1.37), 2.858 (0.95), 2.869 (0.89), 2.879 (0.83), 2.888 (0.90), 2.907 (0.31), 2.917 (0.27), 3.615 (0.54), 4.287 (0.83), 4.301 (1.48), 4.314 (0.78), 5.038 (1.80), 7.025 (2.83), 7.029 (2.71), 7.099 (1.47), 7.103 (1.36), 7.113 (1.74), 7.117 (1.46), 7.212 (11.96), 7.270 (2.43), 7.284 (2.07), 7.580 (5.57), 7.908 (0.88), 8.729 (10.46), 11.240 (0.77).

### Example 26

[0480] 1 alpha,2alpha-1,2-epoxyandrost-4-ene-3,17-dione

[chemical structure]

[0481] For the preparation of the title compound see Example 25. The crude product was further purified by flash chromatography using silica gel (dichloromethane/ethanol gradient) and by preparative HPLC to give the title compound (5.8 mg).

### Preparative HPLC Method

[0482] Instrument: Waters Autopurificationsystem; Column: XBrigde C18 5 µ, 100×30 mm; eluent A: water + 0.1 vol % formic acid; eluent B: acetonitrile; gradient: 0.0-0.5 min 23% B (35-70 mL/min), 0.5-5.5 min 23-58% B; flow: 70 mL/min; temperature: 25° C.; DAD scan: 210-400 nm.

### Analytical HPLC Method

[0483] Instrument: Waters Acquity UPLCMS SingleQuad; Column: Acquity UPLC BEH C18 1.7 µ, 50×2.1 mm; eluent A: water + 0.1 vol % formic acid; eluent B: acetonitrile; gradient: 0-2.6 min 1-99% B, 2.6-3.0 min 99 % B; flow: 0.8 mL/min; temperature: 60° C.; DAD scan: 210-400 nm.

[0484] Analytical HPLC: Rₜ = 1.06 min.

[0485] ¹H-NMR (600 MHz, CHLOROFORM-d) δ [ppm]: 0.95 (s, 3H), 1.13 (qd, 1H), 1.23 - 1.36 (m, 4H), 1.42 (s, 3H), 1.54 - 1.68 (m, 2H), 1.84 - 1.94 (m, 2H), 1.88 - 1.98 (m, 1H), 2.05 - 2.15 (m, 2H), 2.22 - 2.31 (m, 1H), 2.36 - 2.43 (m, 1H), 2.48 (dd, 1H), 3.40 (dd, 1H), 3.67 (d, 1H), 5.76 (s, 1H).

[0486] ¹H-NMR (600 MHz, CHLOROFORM-d) δ [ppm]: 0.000 (1.78), 0.880 (0.44), 0.935 (0.39), 0.949 (14.78), 0.988 (1.17), 1.093 (0.36), 1.100 (0.42), 1.114 (0.85), 1.121 (0.85), 1.136 (0.89), 1.143 (0.90), 1.157 (0.45), 1.164 (0.41), 1.238 (0.73), 1.244 (0.81), 1.255 (2.21), 1.279 (1.39), 1.288 (1.42), 1.303 (1.60), 1.309 (1.87), 1.318 (0.94), 1.327 (1.16), 1.419 (16.00), 1.545 (0.66), 1.560 (1.16), 1.565 (1.06), 1.576 (0.92), 1.581 (1.72), 1.587 (1.04), 1.596 (1.54), 1.602 (1.28), 1.610 (1.26), 1.617 (1.71), 1.633 (1.26), 1.638 (1.20), 1.654 (0.67), 1.662 (0.58), 1.849 (0.39), 1.856 (0.43), 1.868 (1.11), 1.875 (1.61), 1.880 (1.14), 1.887 (1.23), 1.895 (1.53), 1.900 (2.16), 1.918 (0.88), 1.925 (1.35), 1.936 (0.62), 1.940 (0.70), 1.950 (0.73), 1.956 (0.56), 1.961 (0.61), 1.971 (0.54), 2.013 (0.39), 2.072 (0.90), 2.086 (1.84), 2.093 (0.67), 2.103 (1.67), 2.119 (1.48), 2.134 (0.65), 2.245 (0.61), 2.252 (0.74), 2.257 (0.60), 2.267 (0.85), 2.271 (0.99), 2.278 (0.76), 2.291 (0.41), 2.371 (0.67), 2.380 (0.75), 2.393 (1.15), 2.402 (1.07), 2.414 (0.57), 2.423 (0.47), 2.454 (1.10), 2.468 (1.06), 2.486 (0.96), 2.501 (0.92), 2.625 (0.45), 3.393 (1.58), 3.396 (1.81), 3.398 (1.89), 3.402 (1.65), 3.662 (2.62), 3.668 (2.55), 5.756 (2.73), 7.264 (14.93).

### Example 27

[0487] 19-hydroxy-1 alpha,2alpha-1 ,2-epoxyandrost-4-ene-3,17-dione

[chemical structure]

[0488] For the preparation of the title compound see Example 25. The crude product was further purified by flash chromatography using silica gel (dichloromethane/ethanol gradient) and twice by preparative HPLC to give the title compound (3.7 mg).

### 1. Preparative HPLC Method

[0489] Instrument: Waters Autopurificationsystem; Column: XBrigde C18 5 µ, 100×30 mm; eluent A: water + 0.1 vol % formic acid; eluent B: acetonitrile; gradient: 0.0-0.5 min 23% B (35-70 mL/min), 0.5-5.5 min 23-58% B; flow: 70 mL/min; temperature: 25° C.; DAD scan: 210-400 nm.

### 1. Analytical HPLC Method

[0490] Instrument: Waters Acquity UPLCMS SingleQuad; Column: Acquity UPLC BEH C18 1.7 µ, 50×2.1 mm; eluent A: water + 0.1 vol % formic acid; eluent B: acetonitrile; gradient: 0-2.6 min 1-99% B, 2.6-3.0 min 99% B; flow: 0.8 mL/min; temperature: 60° C.; DAD scan: 210-400 nm.

### 2. Preparative HPLC Method

[0491] Instrument: Waters Autopurificationsystem; Column: XBrigde C18 5 µ, 100×30 mm; eluent A: water + 0.1 vol % formic acid; eluent B: acetonitrile; gradient: 0.0-0.5 min 20 % B (35-70 mL/min), 0.5-5.5 min 20-30 % B; flow: 70 mL/min; temperature: 25° C.; DAD scan: 210-400 nm.

### 2. Analytical HPLC Method

[0492] Instrument: Waters Acquity UPLCMS SingleQuad; Column: Acquity UPLC BEH C18 1.7 µ, 50×2.1 mm; eluent A: water + 0.1 vol % formic acid; eluent B: acetonitrile; gradient: 0-2.6 min 1-99% B, 2.6-3.0 min 99% B; flow: 0.8 mL/min; temperature: 60° C.; DAD scan: 210-400 nm.

[0493] Analytical HPLC: Rₜ = 0.82 min.

[0494] ¹H-NMR (600 MHz, CHLOROFORM-d) δ [ppm]: 0.95 (s, 3H), 1.12 - 1.21 (m, 1H), 1.23 - 1.37 (m, 3H), 1.54 - 1.65 (m, 2H), 1.84 - 2.01 (m, 4H), 2.06 - 2.18 (m, 2H), 2.33 - 2.41 (m, 2H), 2.43 - 2.52 (m, 2H), 3.38 (dd, 1H), 3.95 (d, 1H), 4.16 (t, 1H), 4.29 (d, 1H), 5.92 (s, 1H).

[0495] ¹H-NMR (600 MHz, CDCl3) δ [ppm]: 0.881 (0.18), 0.904 (0.57), 0.927 (0.28), 0.948 (16.00), 1.136 (0.33), 1.143 (0.36), 1.157 (0.87), 1.164 (0.89), 1.179 (0.96), 1.186 (0.96), 1.200 (0.48), 1.208 (0.57), 1.240 (0.68), 1.247 (0.73), 1.263 (1.38), 1.269 (1.30), 1.287 (1.12), 1.291 (0.93), 1.297 (0.82), 1.308 (0.99), 1.315 (0.97), 1.318 (0.96), 1.326 (1.21), 1.331 (0.88), 1.336 (0.89), 1.347 (1.18), 1.364 (0.77), 1.369 (0.76), 1.414 (0.40), 1.545 (0.55), 1.552 (0.60), 1.568 (1.36), 1.574 (1.53), 1.590 (2.54), 1.597 (2.84), 1.606 (4.35), 1.621 (2.17), 1.627 (1.63), 1.642 (0.73), 1.881 (0.80), 1.887 (1.28), 1.893 (0.88), 1.904 (0.80), 1.909 (1.20), 1.915 (0.87), 1.926 (0.50), 1.937 (1.32), 1.945 (1.51), 1.952 (1.50), 1.958 (2.52), 1.963 (2.30), 1.970 (1.32), 1.981 (1.80), 2.076 (0.82), 2.090 (1.33), 2.108 (1.19), 2.115 (0.59), 2.123 (2.28), 2.138 (1.12), 2.143 (0.92), 2.148 (0.85), 2.367 (1.13), 2.373 (1.49), 2.388 (1.21), 2.394 (1.41), 2.399 (0.97), 2.435 (0.78), 2.443 (0.82), 2.458 (1.29), 2.464 (2.12), 2.478 (1.61), 2.487 (0.59), 2.495 (1.14), 2.510 (1.01), 2.623 (0.54), 3.377 (1.81), 3.380 (2.08), 3.383 (2.14), 3.387 (1.91), 3.942 (2.83), 3.949 (2.78), 4.146 (0.55), 4.163 (1.05), 4.179 (0.71), 4.278 (2.45), 4.297 (1.82), 5.920 (3.16), 7.266 (11.03).

### Example 28

[0496] 3,15beta-dihydroxyestra-1 (10),2,4-trien-17-one

[chemical structure]

[0497] For the preparation of the title compound see Example 25. The crude product was further purified by flash chromatography using silica gel (dichloromethane/ethanol gradient) and by preparative HPLC to give the title compound (0.8 mg).

### Preparative HPLC Method

[0498] Instrument: Waters Autopurificationsystem; Column: XBrigde C18 5 µ, 100x30 mm; eluent A: water + 0.1 vol % formic acid; eluent B: acetonitrile; gradient: 0.0-0.5 min 25% B (35-70 mL/min), 0.5-5.5 min 25-35% B; flow: 70 mL/min; temperature: 25° C.; DAD scan: 210-400 nm.

### Analytical HPLC Method

[0499] Instrument: Waters Acquity UPLCMS SingleQuad; Column: Acquity UPLC BEH C18 1.7 µ, 50x2.1 mm; eluent A: water + 0.1 vol % formic acid; eluent B: acetonitrile; gradient: 0-2.6 min 1-99% B, 2.6-3.0 min 99% B; flow: 0.8 mL/min; temperature: 60° C.; DAD scan: 210-400 nm.

[0500] Analytical HPLC: Rₜ = 0.85 min.

[0501] ¹H-NMR (600 MHz, Pyr) δ [ppm]: 0.000 (1.30), 1.267 (0.19), 1.452 (0.59), 1.458 (0.76), 1.469 (0.83), 1.477 (0.91), 1.492 (4.48), 1.530 (0.23), 1.551 (0.43), 1.574 (0.61), 1.596 (0.42), 1.618 (0.31), 2.018 (0.47), 2.037 (0.49), 2.137 (0.40), 2.155 (0.41), 2.172 (0.16), 2.301 (0.26), 2.318 (0.42), 2.336 (0.26), 2.352 (0.45), 2.379 (0.51), 2.496 (0.25), 2.666 (0.30), 2.676 (0.32), 2.697 (0.48), 2.707 (0.47), 2.816 (0.89), 2.833 (0.26), 2.848 (0.98), 2.859 (0.55), 2.879 (0.32), 2.887 (0.31), 2.898 (0.31), 4.782 (0.56), 4.989 (1.05), 6.502 (0.65), 7.002 (1.01), 7.106 (0.53), 7.118 (0.60), 7.211 (16.00), 7.313 (0.74), 7.327 (0.66), 7.578 (7.55), 8.731 (12.51), 11.201 (0.27).

### REFERENCES

[0502] Patent WO200107630 A1. n.d.

[0503] Patent EP1196603 A1 . n.d.

[0504] Patent WO2016007623 A1. n.d.

[0505] Patent WO200107630 A1 . n.d.

[0506] Patent EP1131440 A2. n.d.

[0507] Acevedo-Rocha, CG, Gamble, C, Lonsdale, R, Li, A, Nett, N, Hoebenreich, S, Lingnau, JB, Wirtz, C, Fares, C, Hinrichs, H, Deege, A, Mulholland, AJ, Nov, Y, Leys, D, Mclean, K, Munro, A & Reetz, MT. “P450-Catalyzed Regio- and Diastereoselective Steroid Hydroxylation: Efficient Directed Evolution Enabled by Mutability Landscaping.” ACS Catalysis 8, no. 4 (2018): p. 3395-3410.

[0508] Agudo R, Roiban GD, Reetz MT. “Achieving regio- and enantioselectivity of P450-catalyzed oxidative CH activation of small functionalized molecules by structure-guided directed evolution.” Chembiochem, 2012: 1465 -- 73.

[0509] Capdevila, Jorge H. and Wei, Shozou and Helvig, Christian and Falck, John R. and Belosludtsev, Yuri and Truan, Gilles and Graham-Lorence, Sandra E. and Peterson, Julian A. “The Highly Stereoselective Oxidation of Polyunsaturated Fatty Acids by Cytochrome P450BM-3.” Journal of Biological Chemistry 271, no. 37 (1996): p. 22663-22671.

[0510] F. Templeton, John and Lin, Weiyang and Ling, Yangzhi and Majgier-Baranowska, Helena and Marat, Kirk. “Synthesis of 19-hydroxy-1β{,}19-cyclosteroids.” J. Chem. Soc., Perkin Trans. 1, 1997: 2037-2044.

[0511] Green, Michael R, and Joseph Sambrook. Molecular cloning: a laboratory manual. 4th. Cold Spring Harbor, N.Y.: Cold Spring Harbor Laboratory Press, 2012.

[0512] Hazel M Girvan, Andrew W Munro. “Applications of microbial cytochrome P450 enzymes in biotechnology and synthetic biology.” Current Opinion in Chemical Biology 31 (2016): 136-145.

[0513] Hershberg, E B,Rubin, Martin,Schwenk, Erwin. “SYNTHESIS OF ESTRONE FROM ANDROSTADIENEDIONE.” The Journal of Organic Chemistry 15, no. 2 (1950): p. 292 - 300.

[0514] Inhoffen, H H. “Der Weg vom Cholesterin zum Follikelhormon Oestradiol.” Angewandte Chemie 59, no. 7-8 (1947): 207 - 212.

[0515] IUPAC. Gold Book - Compendium of Chemical Terminology. n.d.

[0516] Kawahara R, Fujita K, Yamaguchi R. “Cooperative Catalysis by Iridium Complexes with a Bipyridonate Ligand: Versatile Dehydrogenative Oxidation of Alcohols and Reversible Dehydrogenation-Hydrogenation between 2-Propanol and Acetone.” 2012: 12790 --12794.

[0517] Kille Sabrina, Zilly Felipe E., Acevedo Juan P., Reetz Manfred T. “Regio- and stereoselectivity of P450-catalysed hydroxylation of steroids controlled by laboratory evolution.” Nat Chem. 3, no. 9 (2011): p. 738-743.

[0518] Kille, Sabrina. Flavoproteins in directed evolution : iterative CASTing to evolve YqjM and P450BM3. Bochum, 2010.

[0519] McPherson, M. J. Directed Mutagenesis: A Practical Approach. Vol. 73. IRL Press, 1991.

[0520] Mitsuteru Numazawa, Kouwa Yamashita, Nao Kimura and Madoka Takahashi. “Chemical aromatization of 19-hydroxyandrosta-1,4-diene-3,17-dione with acid or alkaline: Elimination of the 19-hydroxymethyl group as formaldehyde.” Steroids 74, no. 2 (2009): p. 208 - 211.

[0521] Munro, Andrew W,Daff, Simon,Coggins, John R,Lindsay, J Gordon,Chapman, Stephen K. “Probing Electron Transfer in Flavocytochrome P-450 BM3 and Its Component Domains.” European Journal of Biochemistry 239, no. 2 (1996): p. 403-409.

[0522] Narhi, L O and Fulco, A J. “Characterization of a catalytically self-sufficient 119,000-dalton cytochrome P-450 monooxygenase induced by barbiturates in Bacillus megaterium.” Journal of Biological Chemistry 261, no. 16 (1986): p. 7160-7169.

[0523] Noble MA, Miles CS, Chapman SK, Lysek DA, MacKay AC, Reid GA, Hanzlik RP, Munro AW. “Roles of key active-site residues in flavocytochrome P450 BM3.” The Biochemical journal 339, no. Pt 2 (1999): p. 371-379.

1. A Cytochrome P450 BM3 monooxygenase (BM3) variant for catalyzing the C19 hydroxylation of a steroid or steroid derivative, wherein the BM3 variant comprises the mutation F87A and at least one and preferably two further mutations selected from
(i) a mutation at position V78, preferably V78F, V78Y, V78M, V78I or V78L, and
(ii) a mutation at position A82, preferably A82E, A82Q or A82P.

2. The BM3 variant according to claim 1, characterized in comprising
(i) at least the mutations
a) V78Y, A82E and F87A (BM3-254, SEQ ID No. 2),
b) V78M, A82E and F87A (BM3-261, SEQ ID No. 3),
c) V78I, A82E and F87A (BM3-263, SEQ ID No. 4),
d) V78L, A82E and F87A (BM3-268, SEQ ID No. 5).
e) V78Y, A82P and F87A (SEQ ID No. 6),
f) V78M, A82P and F87A (SEQ ID No. 7),
g) V78I, A82P and F87A (SEQ ID No. 8),
h) V78L, A82P and F87A (SEQ ID No. 9),
i) V78Y, A82Q and F87A (SEQ ID No. 10),
j) V78M, A82Q and F87A (SEQ ID No. 11),
k) V78I, A82Q and F87A (SEQ ID No. 12), or
1) V78L, A82Q and F87A (SEQ ID No. 13),
and at least one, two, three, four, five, six, seven, eight, nine or ten further mutation(s), and/or
(ii) at least the mutations
a) V78F, A82E, F87A, M177Y and A184Y (SEQ ID No. 14),
b) V78L, A82E, F87A, M177Y and A184Y (SEQ ID No. 15),
c) V78I, A82E, F87A, M177Y and A184Y (SEQ ID No. 16),
d) V78M, A82E, F87A, M177Y and A184Y (SEQ ID No. 17),
e) V78Y, A82E, F87A, M177Y and A184Y (SEQ ID No. 18),
f) V78F, A82P, F87A, M177Y and A184Y (SEQ ID No. 19),
g) V78L, A82P, F87A, M177Y and A184Y (SEQ ID No. 20),
h) V78I, A82P, F87A, M177Y and A184Y (SEQ ID No. 21),
i) V78M, A82P, F87A, M177Y and A184Y (SEQ ID No. 22),
j) V78Y, A82P, F87A, M177Y and A184Y (SEQ ID No. 23),
k) V78F, A82Q, F87A, M177Y and A184Y (SEQ ID No. 24),
1) V78L, A82Q, F87A, M177Y and A184Y (SEQ ID No. 25),
m) V78I, A82Q, F87A, M177Y and A184Y (SEQ ID No. 26),
n) V78M, A82Q, F87A, M177Y and A184Y (SEQ ID No. 27),
o) V78Y, A82Q, F87A, M177Y and A184Y (SEQ ID No. 28),
p) V78L, A82E, F87A, S72G, M177Y, V178P, L181Y, A184Y and L188F (SEQ ID No. 117),
q) V78L, A82E, F87A, S72G, T146F, M177Y, V178W, L181Y and A184Y (SEQ ID No. 118), or
r) V78L, A82E, F87A, S72G, T146F, M177Y, V178W, L181Y, A184Y, G457S, I458G and A477N (SEQ ID No. 119).

3. A The BM3 variant according to claim 1 , which is characterized by a product yield for at least one C19 hydroxylated steroid or derivative thereof or a secondary product thereof, which is > 5%, preferably > 8%, >10%, or > 12%, even more preferably > 15%, >20%, >25%, > 30%, >35%, > 40%, > 45%, or > 50%, most preferably > 55%, > 60%, > 65 %, > 70% or > 75%.

4. A The BM3 variant according to claim 1, which is characterized by a selectivity factor for the C19 hydroxylation of at least one steroid or steroid derivative, which is > 0.1, preferably > 0.2 or > 0.3, even more preferably > 0.4 or > 0.5, most preferably > 0.5, > 0.6, > 0.7, > 0.8 or > 0.9.

5. The BM3 variant according to claim 1, comprising mutations at at least one, two, three, four, five, six, seven, eight, nine, ten or more position(s) selected from (A184), (A191), (A221), (A264), (A321), (A328), (A33), (A330), (A399), (A74), (D168), (D208), (D222), (D363), (E13), (E143), (E267), (E352), (E64), (E82), (E93), (F173), (F205), (F261), (F331), (F393), (F77), (F81), (G240), (G271), (G402), (G415), (G570), (G677), (G85), (H266), (H659), (I153), (I174), (I258), (I259), (I263), (I401), (K210), (K224), (L150), (L181), (L188), (L20), (L262), (L272), (L29), (L324), (L333), (L356), (L437), (L75), (L78), (L86), (M118), (M177), (M185), (M212), (M354), (N70), (P243), (P326), (P329), (P392), (P9), (R147), (R161), (R190), (R203), (R255), (R323), (R47), (R50), (S164), (S176), (S54), (S72), (S89), (T146), (T149), (T260), (T268), (T269), (T327), (T365), (T436), (T438), (T49), (T88), (V178), (V26), (V299), (V314), (V371), (V48), (W325), (W367), (W90), (Y51), (A225), (A44), (D182), (D80), (E140), (E183), (E337), (E409),(G114), (G227), (G46), (H236), (H92), (K187), (K440), (K76), (M5), (N186), (P172), (Q189), (Q397), (Q403), (Q404), (Q73), (R179), (R79), (S270), (S53) and (T175).

6. A The BM3 variant according to claim 1, wherein said BM3 variant has an improved selectivity or product yield for C19 hydroxylation compared with at least one BM3 variant selected from the variants according to SEQ ID No. 2 to 5.

7. A The BM3 variant according to claim 1, wherein said BM3 variant comprises the mutations M177Y and/or A184Y.

8. A The BM3 variant according to claim 1, wherein said BM3 variant comprises at least the mutation(s) (A184D) or (A184D, L188K) or (A184E) or (A184F) or (A184G) or (A184H) or (A184I) or (A184K) or (A184L) or (A184N) or (A184Q) or (A184R) or (A184W) or (A184W, L188F) or (A184Y) or (A184Y, L188K) or (A184Y, R50S) or (A221S) or (A264V) or (A321C) or (A321D) or (A321E) or (A321G) or (A321I) or (A321N) or (A321T) or (A321V) or (A328P) or (A330C) or (A330D) or (A330E) or (A330F) or (A330G) or (A330H) or (A330I) or (A330K) or (A330L) or (A330M) or (A330N) or (A330Q) or (A330R) or (A330S) or (A330T) or (A330T, E352A) or (A330T, F331V) or (A330V) or (A330W) or (A330Y) or (A330Y, W367C) or (A33V) or (A399C) or (A399E) or (A399G) or (A399I) or (A399L) or (A399M) or (A399N) or (A399Q) or (A399R) or (A399S) or (A399T) or (A399V) or (A74C) or (A74C, L75V) or (A74D) or (A74D, F81V) or (A74E) or (A74F) or (A74G) or (A74G, L75C) or (A74H) or (A74I) or (A74I, A184W, L188F) or (A74I, F77A, L181Y, A184W) or (A74I, L181Y, L188K) or (A74I, L181Y, L188R) or (A74I, L188F) or (A74I, L188K) or (A74I, L188R) or (A74I, M177Y, A184R, L188F) or (A74I, M177Y, V178P, A184G) or (A74I, T146F) or (A74I, T146F, L181Y) or (A74I, T146F, L181Y, L188K) or (A74I, T146F, L181Y, L188R) or (A74I, T146F, L188F) or (A74I, T146F, L188K) or (A74I, T146F, V178P) or (A74I, T146F, V178P, L181Y, L188F) or (A74I, T146F, V178P, L181Y, L188K) or (A74I, T146F, V178P, L188K) or (A74I, T146F, V178P, L188R) or (A74I, T146F, V178W) or (A74I, T146F, V178W, L181Y, L188F) or (A74I, T146F, V178W, L181Y, L188R) or (A74I, T146F, V178W, L188F) or (A74I, T146F, V178W, L188K) or (A74I, T146F, V178W, L188R) or (A74I, V178P) or (A74I, V178P, L181Y) or (A74I, V178P, L181Y, L188R) or (A74I, V178P, L188F) or (A74I, V178P, L188K) or (A74I, V178P, L188R) or (A74I, V178W, L188F) or (A74I, V178W, L188K) or (A74I, V178W, L188R) or (A74K) or (A74L) or (A74M) or (A74N) or (A74P) or (A74Q) or (A74R) or (A74R, L75V) or (A74S) or (A74T) or (A74T, A184D) or (A74T, F77A, L181Y, A184D, L188K) or (A74T, F77A, V178W, A184Y) or (A74T, F77L, L181Y, A184D, L188K) or (A74T, L181Y) or (A74T, L181Y, A184D, L188K) or (A74T, L181Y, A184Y, L188K) or (A74T, L181Y, L188K) or (A74T, L181Y, L188R) or (A74T, L188K) or (A74T, M177Y, L181Y, A184D, L188K) or (A74T, T146F, L181Y, A184D, L188K) or (A74T, T146F, L181Y, L188K) or (A74T, T146F, L181Y, L188R) or (A74T, T146F, L188F) or (A74T, T146F, L188K) or (A74T, T146F, L188R) or (A74T, T146F, V178P) or (A74T, T146F, V178P, L181Y) or (A74T, T146F, V178P, L188K) or (A74T, T146F, V178P, L188R) or (A74T, T146F, V178W) or (A74T, T146F, V178W, L181Y) or (A74T, T146F, V178W, L181Y, L188K) or (A74T, T146F, V178W, L188R) or (A74T, V178P) or (A74T, V178P, L188F) or (A74T, V178P, L188K) or (A74T, V178P, L188R) or (A74T, V178W, L181Y, L188K) or (A74T, V178W, L188K) or (A74T, V178W, L188R) or (A74V) or (A74V, F77A, A184N, L188F) or (A74V, L181Y) or (A74V, L181Y, A184D, L188K) or (A74V, L181Y, A184W, L188F) or (A74V, L181Y, L188F) or (A74V, L188F) or (A74V, L188K) or (A74V, L75V) or (A74V, T146F, L181Y, L188K) or (A74V, T146F, L181Y, L188R) or (A74V, T146F, L188K) or (A74V, T146F, L188R) or (A74V, T146F, V178W) or (A74V, T146F, V178W, L181Y, L188F) or (A74V, V178P, A184W, L188K) or (A74V, V178P, L181Y, L188F) or (A74V, V178P, L181Y, L188K) or (A74V, V178P, L181Y, L188R) or (A74V, V178P, L188F) or (A74V, V178W, L188K) or (A74W) or (A74Y) or (D168Y, F173D) or (D363G, T438C) or (E13D, R47L) or (E143A) or (E143C) or (E143D) or (E143F) or (E143G) or (E143I) or (E143K) or (E143L) or (E143M) or (E143N) or (E143P) or (E143Q) or (E143R) or (E143S) or (E143V) or (E143W) or (E143Y) or (E267A) or (E267C) or (E267D) or (E267G) or (E267K) or (E267P) or (E267R) or (E267S) or (E267T) or (E267Y) or (E352A) or (E352D) or (E352F) or (E352G) or (E352I) or (E352L) or (E352M) or (E352N) or (E352P) or (E352R) or (E352S) or (E352T) or (E352V) or (E352W) or (E352Y) or (E64A) or (E64G) or (E64H) or (E64I) or (E64K) or (E64L) or (E64M) or (E64N) or (E64Q) or (E64V) or (E64W) or (E64Y) or (E82P) or (E93G) or (F173C) or (F173C, F205G) or (F173D) or (F173I) or (F173K) or (F173L) or (F173M) or (F173N) or (F173P) or (F173Q) or (F173R) or (F173S) or (F173S, F205P) or (F173V) or (F173W) or (F173Y) or (F173Y, I174F) or (F205A) or (F205C) or (F205D) or (F205D, D208N) or (F205E) or (F205G) or (F205H) or (F205I) or (F205K) or (F205L) or (F205M) or (F205N) or (F205P) or (F205R) or (F205S) or (F205T) or (F205V) or (F205W) or (F205Y) or (F261A) or (F261C) or (F261D) or (F261G) or (F261I) or (F261L) or (F261M) or (F261N) or (F261Q) or (F261S) or (F261T) or (F261V) or (F261W) or (F261Y) or (F331C) or (F331H) or (F331I) or (F331L) or (F331M) or (F331N) or (F331P) or (F331T) or (F331V) or (F331W) or (F331Y) or (F393M) or (F393W) or (F77A) or (F77A, A184W) or (F77A, L181P, A184Y, L188K) or (F77A, M177Y) or (F77C) or (F77D) or (F77E) or (F77G) or (F77H) or (F77I) or (F77K) or (F77L) or (F77M) or (F77N) or (F77P) or (F77R) or (F77S) or (F77T) or (F77V) or (F77V, L86M) or (F77W) or (F77Y) or (F81A) or (F81C) or (F81D) or (F81I) or (F81L) or (F81P) or (F81R) or (F81S) or (F81T) or (F81V) or (F81W) or (F81Y) or (G271A) or (G271C) or (G271D) or (G271E) or (G271F) or (G271H) or (G271K) or (G271L) or (G271M) or (G271N) or (G271P) or (G271Q) or (G271R) or (G271S) or (G271T) or (G271V) or (G271W) or (G271Y) or (G402A) or (G415A) or (G415D) or (G415S) or (G415T) or (G415V) or (G85A) or (G85L) or (G85S) or (H266A) or (H266C) or (H266D) or (H266E) or (H266F) or (H266G) or (H266I) or (H266K) or (H266M) or (H266N) or (H266P) or (H266Q) or (H266R) or (H266S) or (H266T) or (H266V) or (H266W) or (H266Y) or (I153F, G271L) or (I153L) or (I153L, F173Y) or (I259A) or (I259C) or (I259D) or (I259F) or (I259G) or (I259H) or (I259K) or (I259L) or (I259M) or (I259N) or (I259Q) or (I259S) or (I259T) or (I259V) or (I259W) or (I259Y) or (I263A) or (I263C) or (I263E) or (I263F) or (I263G) or (I263H, A264G) or (I263K) or (I263L) or (I263M) or (I263N) or (I263Q) or (I263S) or (I263T) or (I263V) or (I263Y) or (I401A) or (I401L) or (I401M) or (I401T) or (I401V) or (K210E) or (K210T, G271V) or (K224C) or (K224E) or (K224F) or (K224H) or (K224I) or (K224L) or (K224M) or (K224P) or (K224Q) or (K224W) or (K224Y) or (L150A) or (L150C) or (L150D) or (L150E) or (L150F) or (L150G) or (L150H) or (L150I) or (L150K) or (L150M) or (L150N) or (L150Q) or (L150R) or (L150R, F205R) or (L150S) or (L150S, F173L) or (L150T) or (L150V) or (L150W) or (L150Y) or (L181H) or (L181I) or (L181M) or (L181P) or (L181V) or (L181Y) or (L181Y, A184D) or (L181Y, L188F) or (L181Y, L188K) or (L181Y, L188K, H659R) or (L188A) or (L188D) or (L188E) or (L188F) or (L188H) or (L188I) or (L188K) or (L188M) or (L188N) or (L188Q) or (L188R) or (L188S) or (L188W) or (L20C) or (L20D) or (L20E) or (L20F) or (L20G) or (L20G, R47L) or (L20I) or (L20M) or (L20N) or (L20P) or (L20R) or (L20S) or (L20T) or (L20V) or (L20W) or (L20Y) or (L262I) or (L262V) or (L262W) or (L262Y) or (L272A) or (L272C) or (L272E) or (L272F) or (L272G) or (L272I) or (L272K) or (L272M) or (L272N) or (L272Q) or (L272R) or (L272S) or (L272T) or (L272V) or (L272W) or (L272Y) or (L29A) or (L29C) or (L29D) or (L29F) or (L29H) or (L29I) or (L29M) or (L29M, R47G) or (L29P) or (L29Q) or (L29S) or (L29T) or (L29V) or (L29W) or (L29Y) or (L324F) or (L356C) or (L356F) or (L356H) or (L356I) or (L356M) or (L356N) or (L356Q) or (L356S) or (L356T) or (L356V) or (L356W) or (L437I) or (L437M) or (L75H, F81S) or (L75I) or (L75I, F81C) or (L75I, F81G) or (L75I, F81H) or (L75I, F81I) or (L75I, F81L) or (L75I, F81S) or (L75I, F81V) or (L75I, F81Y) or (L75V) or (L75V, F81C) or (L75V, F81H) or (L75V, F81I) or (L75V, F81L) or (L75V, F81V) or (L75V, F81Y) or (L78F) or (L78I) or (L78M) or (L78V) or (L78Y) or (L86A, S89T) or (L86I) or (L86I, S89T) or (L86M) or (L86M, S89T) or (L86N, S89T) or (L86V) or (L86V, S89T) or (M118A) or (M118E) or (M118F) or (M118G) or (M118H) or (M118I) or (M118K) or (M118L) or (M118N) or (M118P) or (M118Q) or (M118S) or (M118T) or (M118V) or (M118W) or (M118Y) or (M177A) or (M177C) or (M177C, V178Y) or (M177D) or (M177E) or (M177F) or (M177G) or (M177H) or (M177I) or (M177K) or (M177L) or (M177N) or (M177P) or (M177Q) or (M177R) or (M177T) or (M177V) or (M177Y) or (M177Y, A184W) or (M177Y, A184Y) or (M177Y, M185V) or (M177Y, R50S) or (M177Y, V178P) or (M177Y, V178P, A184Y, L188F) or (M177Y, V178W) or (M177Y, V178W, A184Y) or (M177Y, V178W, A184Y, L188F) or (M185C) or (M185D) or (M185E) or (M185G) or (M185H) or (M185K) or (M185L) or (M185N) or (M185Q) or (M185R) or (M185V) or (M185Y) or (M212A) or (M212C) or (M212C, I259L) or (M212D) or (M212E) or (M212F) or (M212G) or (M212H) or (M212K) or (M212L) or (M212L, I259F) or (M212P) or (M212Q) or (M212R) or (M212S) or (M212T) or (M212V) or (M212W) or (M212Y) or (M354A) or (M354C) or (M354D) or (M354E) or (M354G) or (M354I) or (M354K) or (M354K, D363Y) or (M354L) or (M354N) or (M354Q) or (M354R) or (M354S) or (M354T) or (M354V) or (M354W) or (M354Y) or (N70A) or (N70C) or (N70F) or (N70G) or (N70H) or (N70K) or (N70R) or (N70W) or (N70Y) or (P243T, H266L) or (P326C) or (P326D) or (P326G) or (P326N) or (P326S) or (P326T) or (P329A) or (P329C) or (P329G) or (P329K) or (P329S) or (P329T) or (P392C) or (P392G) or (P392Q) or (P392R) or (P392V) or (P9S) or (R147C, H266G) or (R161C, G271D) or (R190L, F261V) or (R203C) or (R255A) or (R255F) or (R255G) or (R255I) or (R255K) or (R255L) or (R255M) or (R255N) or (R255P) or (R255T) or (R255W) or (R323C) or (R47A) or (R47C) or (R47D) or (R47E) or (R47F) or (R47G) or (R47H) or (R47H, A74W) or (R47I) or (R47K) or (R47L) or (R47M) or (R47N) or (R47P) or (R47Q) or (R47S) or (R47T) or (R47V) or (R47W) or (R50A) or (R50C) or (R50D) or (R50E) or (R50F) or (R50G) or (R50I) or (R50L) or (R50M) or (R50N) or (R50P) or (R50Q) or (R50S) or (R50S, A184W, L188F) or (R50S, A74I, A184W, L188F) or (R50S, A74M, A184Y, L188K) or (R50S, A74T, L181Y, A184D, L188K, G240R) or (R50S, A74V) or (R50S, M177Y, V178P, A184Y) or (R50S, M177Y, V178W, A184W) or (R50S, M177Y, V178W, A184Y) or (R50S, M177Y, V178W, A184Y, A330R) or (R50S, M177Y, V178W, A184Y, A74V, G677D) or (R50S, M177Y, V178W, A184Y, H266S) or (R50S, M177Y, V178W, A184Y, L181P) or (R50S, M177Y, V178W, A184Y, L181Y) or (R50S, M177Y, V178W, A184Y, L188K) or (R50S, M177Y, V178W, A184Y, L188R) or (R50S, M177Y, V178W, A184Y, T146F) or (R50S, M177Y, V178W, A184Y, V26N) or (R50S, M177Y, V178W, L181Y, A184Y) or (R50S, S72G, A74V) or (R50S, S72G, A74V, M177Y, A184Y) or (R50S, S72G, A74V, M177Y, V178P, A184Y) or (R50S, S72G, A74V, M177Y, V178W, A184Y) or (R50S, S72G, A74V, M177Y, V178W, A184Y, L188R) or (R50S, T146F, M177Y, V178W, A184Y) or (R50V) or (R50Y) or (S164N, F261L) or (S176A, A184Y, L188K) or (S176C) or (S176D) or (S176E) or (S176F) or (S176G) or (S 176H) or (S 176K) or (S 176L) or (S 176M) or (S 176N) or (S 176P) or (S 176Q) or (S 176R) or (S72C, A74C) or (S72C, A74I) or (S72C, A74L) or (S72C, A74V) or (S72C, A74Y) or (S72D, A74C) or (S72D, A74F) or (S72G) or (S72G, A74C) or (S72G, A74F) or (S72G, A74H) or (S72G, A74I) or (S72G, A74I, A184W, L188F) or (S72G, A74I, F77A, M177Y) or (S72G, A74I, F77L) or (S72G, A74I, F77L, M177Y) or (S72G, A74I, L181Y) or (S72G, A74I, L181Y, L188F) or (S72G, A74I, L181Y, L188K) or (S72G, A74I, L181Y, L188R) or (S72G, A74I, L188F) or (S72G, A74I, L188K) or (S72G, A74I, L188R) or (S72G, A74I, T146F) or (S72G, A74I, T146F, L181Y) or (S72G, A74I, T146F, L181Y, L188F) or (S72G, A74I, T146F, L181Y, L188K) or (S72G, A74I, T146F, L181Y, L188R) or (S72G, A74I, T146F, L188F) or (S72G, A74I, T146F, L188K) or (S72G, A74I, T146F, L188R) or (S72G, A74I, T146F, V178P) or (S72G, A74I, T146F, V178P, L181Y) or (S72G, A74I, T146F, V178P, L181Y, L188F) or (S72G, A74I, T146F, V178P, L181Y, L188K) or (S72G, A74I, T146F, V178P, L181Y, L188R) or (S72G, A74I, T146F, V178P, L188F) or (S72G, A74I, T146F, V178P, L188K) or (S72G, A74I, T146F, V178P, L188R) or (S72G, A74I, T146F, V178W) or (S72G, A74I, T146F, V178W, L181Y) or (S72G, A74I, T146F, V178W, L181Y, L188F) or (S72G, A74I, T146F, V178W, L181Y, L188K) or (S72G, A74I, T146F, V178W, L181Y, L188R) or (S72G, A74I, T146F, V178W, L188F) or (S72G, A74I, T146F, V178W, L188K) or (S72G, A74I, T146F, V178W, L188R) or (S72G, A74I, V178P) or (S72G, A74I, V178P, L181Y) or (S72G, A74I, V178P, L181Y, L188K) or (S72G, A74I, V178P, L181Y, L188R) or (S72G, A74I, V178P, L188F) or (S72G, A74I, V178P, L188K) or (S72G, A74I, V178P, L188R) or (S72G, A74I, V178W) or (S72G, A74I, V178W, L181Y, L188F) or (S72G, A74I, V178W, L181Y, L188K) or (S72G, A74I, V178W, L181Y, L188R) or (S72G, A74I, V178W, L188F) or (S72G, A74I, V178W, L188K) or (S72G, A74I, V178W, L188R) or (S72G, A74L) or (S72G, A74M, A184Y, L188K) or (S72G, A74S) or (S72G, A74T) or (S72G, A74T, L181Y, A184D, L188K) or (S72G, A74T, L181Y, L188F) or (S72G, A74T, L181Y, L188K) or (S72G, A74T, L181Y, L188R) or (S72G, A74T, L188F) or (S72G, A74T, L188K) or (S72G, A74T, L188R) or (S72G, A74T, T146F) or (S72G, A74T, T146F, L181Y) or (S72G, A74T, T146F, L181Y, L188K) or (S72G, A74T, T146F, L181Y, L188R) or (S72G, A74T, T146F, L188F) or (S72G, A74T, T146F, L188K) or (S72G, A74T, T146F, L188R) or (S72G, A74T, T146F, V178P) or (S72G, A74T, T146F, V178P, L181Y) or (S72G, A74T, T146F, V178P, L188F) or (S72G, A74T, T146F, V178P, L188K) or (S72G, A74T, T146F, V178P, L188R) or (S72G, A74T, T146F, V178W) or (S72G, A74T, T146F, V178W, L181Y) or (S72G, A74T, T146F, V178W, L181Y, L188F) or (S72G, A74T, T146F, V178W, L181Y, L188K) or (S72G, A74T, T146F, V178W, L181Y, L188R) or (S72G, A74T, T146F, V178W, L188F) or (S72G, A74T, T146F, V178W, L188K) or (S72G, A74T, T146F, V178W, L188R) or (S72G, A74T, V178P) or (S72G, A74T, V178P, L181Y) or (S72G, A74T, V178P, L181Y, L188F) or (S72G, A74T, V178P, L181Y, L188K) or (S72G, A74T, V178P, L188F) or (S72G, A74T, V178P, L188K) or (S72G, A74T, V178P, L188R) or (S72G, A74T, V178W) or (S72G, A74T, V178W, L181Y, L188F) or (S72G, A74T, V178W, L181Y, L188K) or (S72G, A74T, V178W, L188F) or (S72G, A74T, V178W, L188K) or (S72G, A74T, V178W, L188R) or (S72G, A74V) or (S72G, A74V, A184W) or (S72G, A74V, A221V) or (S72G, A74V, F77A) or (S72G, A74V, F77A, M177Y) or (S72G, A74V, F77L, M177Y) or (S72G, A74V, F77S) or (S72G, A74V, L181Y) or (S72G, A74V, L181Y, L188F) or (S72G, A74V, L181Y, L188K) or (S72G, A74V, L188F) or (S72G, A74V, L188K) or (S72G, A74V, L188R) or (S72G, A74V, T146F) or (S72G, A74V, T146F, L181Y) or (S72G, A74V, T146F, L181Y, L188F) or (S72G, A74V, T146F, L181Y, L188K) or (S72G, A74V, T146F, L181Y, L188R) or (S72G, A74V, T146F, L188F) or (S72G, A74V, T146F, L188K) or (S72G, A74V, T146F, L188R) or (S72G, A74V, T146F, V178P) or (S72G, A74V, T146F, V178P, L181Y) or (S72G, A74V, T146F, V178P, L181Y, L188F) or (S72G, A74V, T146F, V178P, L181Y, L188K) or (S72G, A74V, T146F, V178P, L181Y, L188R) or (S72G, A74V, T146F, V178P, L188F) or (S72G, A74V, T146F, V178P, L188K) or (S72G, A74V, T146F, V178P, L188R) or (S72G, A74V, T146F, V178W) or (S72G, A74V, T146F, V178W, L181Y) or (S72G, A74V, T146F, V178W, L181Y, L188K) or (S72G, A74V, T146F, V178W, L181Y, L188R) or (S72G, A74V, T146F, V178W, L188F) or (S72G, A74V, T146F, V178W, L188K) or (S72G, A74V, T146F, V178W, L188R) or (S72G, A74V, V178P) or (S72G, A74V, V178P, L181Y) or (S72G, A74V, V178P, L181Y, L188F) or (S72G, A74V, V178P, L181Y, L188K) or (S72G, A74V, V178P, L181Y, L188R) or (S72G, A74V, V178P, L188F) or (S72G, A74V, V178P, L188K) or (S72G, A74V, V178P, L188R) or (S72G, A74V, V178W) or (S72G, A74V, V178W, L181Y) or (S72G, A74V, V178W, L181Y, L188F) or (S72G, A74V, V178W, L181Y, L188K) or (S72G, A74V, V178W, L181Y, L188R) or (S72G, A74V, V178W, L188F) or (S72G, A74V, V178W, L188K) or (S72G, A74V, V178W, L188R) or (S72G, A74Y) or (S72G, L181Y) or (S72G, L181Y, L188F) or (S72G, L181Y, L188K) or (S72G, L181Y, L188R) or (S72G, L188F) or (S72G, L188K) or (S72G, L188R) or (S72G, M177Y, V178W) or (S72G, M177Y, V178W, L188K) or (S72G, T146F) or (S72G, T146F, L181Y) or (S72G, T146F, L181Y, L188F) or (S72G, T146F, L181Y, L188K) or (S72G, T146F, L181Y, L188R) or (S72G, T146F, L188F) or (S72G, T146F, L188K) or (S72G, T146F, L188R) or (S72G, T146F, V178P) or (S72G, T146F, V178P, L181Y) or (S72G, T146F, V178P, L181Y, L188F) or (S72G, T146F, V178P, L181Y, L188K) or (S72G, T146F, V178P, L181Y, L188R) or (S72G, T146F, V178P, L188F) or (S72G, T146F, V178P, L188K) or (S72G, T146F, V178P, L188R) or (S72G, T146F, V178W) or (S72G, T146F, V178W, L181Y) or (S72G, T146F, V178W, L181Y, L188F) or (S72G, T146F, V178W, L181Y, L188K) or (S72G, T146F, V178W, L188F) or (S72G, T146F, V178W, L188K) or (S72G, T146F, V178W, L188R) or (S72G, V178P) or (S72G, V178P, L181Y) or (S72G, V178P, L181Y, L188F) or (S72G, V178P, L181Y, L188K) or (S72G, V178P, L181Y, L188R) or (S72G, V178P, L188F) or (S72G, V178P, L188K) or (S72G, V178P, L188R) or (S72G, V178W) or (S72G, V178W, L181Y) or (S72G, V178W, L181Y, L188F) or (S72G, V178W, L181Y, L188K) or (S72G, V178W, L181Y, L188R) or (S72G, V178W, L188F) or (S72G, V178W, L188K) or (S72G, V178W, L188R) or (S72H, A74C) or (S72H, A74G) or (S72H, A74S) or (S72H, A74Y) or (S72N, A74C) or (S72N, A74I) or (S72N, A74N) or (S72N, A74V) or (S72T) or (S72W) or (S72W, A74I, A184W, L188F) or (S72W, A74V) or (S72W, L333R) or (S72W, W90Y, V299G) or (S72Y, A74V) or (S89C) or (S89E) or (S89G) or (S89I) or (S89L) or (S89M) or (S89N) or (S89Q) or (S89R) or (S89T) or (S89V) or (T146A) or (T146A, D222Y, I263M) or (T146A, F173D) or (T146A, F173V) or (T146A, F205G) or (T146A, F261C) or (T146A, F261S) or (T146A, F261V) or (T146A, G271R) or (T146A, G271S) or (T146A, G271T) or (T146A, H266T) or (T146A, H266V) or (T146A, I258T, I259S) or (T146A, I259H) or (T146A, I263F) or (T146A, I263L) or (T146A, I263N) or (T146A, I263V) or (T146A, L150A) or (T146A, L150G) or (T146A, L150K) or (T146A, L150R, F173I) or (T146A, L272H) or (T146A, L272R) or (T146A, L272S) or (T146A, L272W) or (T146A, M212A) or (T146C) or (T146D) or (T146E) or (T146F) or (T146F, L181Y) or (T146F, L181Y, L188F) or (T146F, L181Y, L188K) or (T146F, L188K) or (T146F, L188R) or (T146F, V178P) or (T146F, V178P, L181Y, L188R) or (T146F, V178P, L188K) or (T146F, V178P, L188R) or (T146F, V178W) or (T146F, V178W, L181Y, L188R) or (T146F, V178W, L188F) or (T146F, V178W, L188K) or (T146F, V178W, L188R) or (T146G) or (T146H) or (T146L) or (T146M) or (T146N) or (T146P) or (T146R) or (T146S) or (T146V) or (T146V, A191T) or (T146Y) or (T149P) or (T260A) or (T260S) or (T260W) or (T268A) or (T268S) or (T269K) or (T327A) or (T327A, A330W) or (T327C) or (T327D) or (T327E) or (T327G) or (T327I) or (T327L) or (T327M) or (T327N) or (T327P) or (T327Q) or (T327S) or (T327V) or (T365A) or (T365C) or (T365D) or (T365F) or (T365G) or (T365H) or (T365I) or (T365K) or (T365L) or (T365N) or (T365P) or (T365Q) or (T365V) or (T365W) or (T365Y) or (T436A) or (T436C) or (T436D) or (T436E) or (T436F) or (T436G) or (T436H) or (T436I) or (T436K) or (T436L) or (T436M) or (T436N) or (T436P) or (T436Q) or (T436R) or (T436S) or (T436V) or (T436W) or (T436Y) or (T438A) or (T438C) or (T438G) or (T438I) or (T438L) or (T438S) or (T438V) or (T49A) or (T49C) or (T49D) or (T49E) or (T49F) or (T49G) or (T49H) or (T49I) or (T49K) or (T49L) or (T49L, S54N) or (T49M) or (T49N) or (T49P) or (T49Q) or (T49R) or (T49R, R50C) or (T49R, R50S, M177Y, V178W, A184Y) or (T49S) or (T49V) or (T49W) or (T49Y) or (T88A) or (T88C) or (T88S) or (T88V) or (V178A) or (V178D) or (V178F) or (V178H) or (V178I) or (V178K) or (V178L) or (V178M) or (V178N) or (V178P) or (V178P, L181Y) or (V178P, L181Y, L188R) or (V178P, L188F) or (V178P, L188K) or (V178P, L188R) or (V178Q) or (V178R) or (V178S) or (V178T) or (V178W) or (V178W, A184Y) or (V178W, L181Y, L188K) or (V178W, L181Y, L188R) or (V178W, L188R) or (V178W, R50S) or (V178Y) or (V26A) or (V26C) or (V26E) or (V26F) or (V26G) or (V26G, R47S) or (V26H) or (V26I) or (V26K) or (V26L) or (V26M) or (V26N) or (V26N, R50S, M177Y, V178W, A184Y) or (V26Q) or (V26R) or (V26S) or (V26T) or (V26W) or (V26Y) or (V314A) or (V314E) or (V314F) or (V314H) or (V314P) or (V314Q) or (V314S) or (V314Y) or (V371P) or (V48A) or (V48D) or (V48E) or (V48F) or (V48G) or (V48H) or (V48I) or (V48L) or (V48M) or (V48P) or (V48Q) or (V48R) or (V48S) or (V48T) or (V48W) or (V48Y) or (W325A) or (W325C) or (W325D) or (W325E) or (W325F) or (W325G) or (W325I) or (W325K) or (W325L) or (W325M) or (W325Q) or (W325R) or (W325S) or (W325T) or (W325V) or (W325Y) or (W90D) or (W90Y) or (W90Y, V299G, G570D) or (Y51A) or (Y51C) or (Y51E) or (Y51F) or (Y51G) or (Y51H) or (Y51I) or (Y51L) or (Y51M) or (Y51N) or (Y51P) or (Y51Q) or (Y51S) or (Y51S, F77V) or (Y51T) or (Y5 1V) or (Y51W) or (A225C) or (A225G) or (A225M) or (A225N) or (A225Q) or (A225S) or (A225T) or (A225V) or (A225Y) or (A44G) or (A44Q) or (A44T) or (D182A) or (D182C) or (D182E) or (D182H) or (D182I) or (D182M) or (D182N) or (D182V) or (D182W) or (D80C) or (D80L) or (D80M) or (D80N) or (D80S) or (D80T) or (D80W) or (E140A) or (E140D) or (E140K) or (E140L) or (E140M) or (E140T) or (E183D) or (E183T) or (E337L) or (E337V) or (E409N) or (G114C) or (G114K) or (G114L) or (G114N) or (G114W) or (G227N) or (G227R) or (G240A) or (G240C) or (G240H) or (G240K) or (G240M) or (G240N) or (G240Q) or (G240R) or (G240S) or (G240V) or (G46T) or (H236A) or (H236C) or (H236D) or (H236F) or (H236G) or (H236I) or (H236K) or (H236M) or (H236P) or (H236R) or (H236S) or (H236Y) or (H92F) or (H92Y) or (I174T) or (I174V) or (I258C) or (I258L) or (I258M) or (1258V) or (K187A) or (K187G) or (K187N) or (K187R) or (K440C) or (K440M) or (K440N) or (K440T) or (K76C) or (K76E) or (K76F) or (K76H) or (K76I) or (K76L) or (K76N) or (K76V) or (M5C) or (M5E) or (M5P) or (M5Q) or (N186A) or (N186D) or (N186E) or (N186F) or (N186H) or (N186K) or (N186L) or (N186M) or (N186Q) or (N186T) or (N186V) or (N186Y) or (P172A) or (P172D) or (P172G) or (Q189E) or (Q189I) or (Q189K) or (Q189N) or (Q189V) or (Q397R) or (Q403K) or (Q403R) or (Q404F) or (Q404Y) or (Q73A) or (Q73E) or (Q73F) or (Q73L) or (Q73S) or (Q73T) or (Q73W) or (Q73Y) or (R179A) or (R179H) or (R179L) or (R179M) or (R179P) or (R179V) or (R190C) or (R190G) or (R190K) or (R190M) or (R190N) or (R190S) or (R190V) or (R190W) or (R79E) or (R79K) or (S270A) or (S270D) or (S270G) or (S53C) or (T175F) or (T175G) or (T175H) or (T175L) or (T175M) or (T175N) or (T175Q) or (T175R) or (T175Y) or (T269A) or (T269V) or (V299L) or (V299W) or (A225V, H236K, G240V, T269V) or (D80I, D182H, A225V, G240V, T269V) or (F173W, R179L, R190V, A225V) or (F173W, R179L, R190V, K440C) or (F173W, R179L, T269V, K440C) or (F173W, R190V, H236K, T269V) or (H236K, G240V, T269V, K440C) or (K76I, F173W, R179L, D182I, R190V, K440C) or (Q73W, D80I, N186V, G240V) or (R179L, A225S) or (R179L, A225V, G240V, K440C) or (R179L, R190V) or (R190V, A225V, T269V, K440C) or (T175M, H236D) or (T175M, R190V).

9. The BM3 variant according to claim 1, wherein an amino acid sequence (insert) has been introduced between amino acid positions 458 and 477, and wherein the insert has at least 90%, 95%, 99% or 100% sequence identity with a sequence according to any of SEQ ID No. 123 to 173.

10. A Cytochrome P450 BM3 monooxygenase (BM3) variant characterized by an improved BM3 protein expression relative to BM3 wildtype (WT),
a) wherein the BM3 variant comprises mutations at at least one, two, three, four, five, six, seven, eight, nine, ten, or at all amino acid positions of (C62), (S106), (Q110), (A1 17), (Q128), (T152), (G157), (G227), (P243), (H285), (Q288), (A295), (N319), (G368), (V371), (K391), (N395) and (H408), and preferably
b) wherein said BM3 variant comprises at least one, two, three, four, five, six, seven, eight, nine, ten or all mutations of (C62L), (S106A), (Q110E), (A117P), (Q128E), (T152I), (G157L), (G227P), (P243E), (H285E), (Q288E), (A295D), (N319E), (G368E), (V371P), (K391L), (N395F) and (H408L).

11. The BM3 variant according to claim 10 wherein the BM3 variant comprises the mutations (S106A, Q128E) or (S106A, H285E, Q288E) or (S106A, Q128E, H285E) or (C62L, A117P, G157L, N319E) or (C62L, G227P, N319E, K391L) or (Q110E, Q128E, Q288E, N319E) or (Q128E, H285E, Q288E, N319E) or (C62L, S106A, A117P, A295D, V371P) or (C62L, S106A, A117P, G227P, P243E) or (C62L, S106A, Q128E, G227P, K391L) or (S106A, Q110E, G227P, H285E, K391L) or (C62L, S106A, Q128E, G227P, Q288E, K391L) or (S106A, G227P, H285E, V371P, K391L, H408L) or (S106A, Q110E, G227P, N319E, K391L, N395F) or (C62L, S106A, Q128E, T152I, G227P, P243E, H408L) or (S106A, Q110E, Q128E, G227P, Q288E, N319E, K391L) or (C62L, S106A, Q128E, G157L, P243E, A295D, G368E, K391L) or (S106A, A117P, Q128E, T152I, G227P, N319E, V371P, N395F).

12. The BM3 variant according to claim 10 wherein the BM3 variant comprises the mutation F87A and at least one and preferably two further mutations selected from
(i) a mutation at position V78, preferably V78F, V78Y, V78M, V78I or V78L, and
(ii) a mutation at position A82, preferably A82E, A82Q or A82P,
wherein the BM3 variant catalyzes the C19 hydroxylation of a steroid or steroid derivative.

13. A nucleic acid encoding for a Cytochrome P450 BM3 monooxygenase variant according to claim 1.

14. A host cell for the production of a Cytochrome P450 BM3 monooxygenase variant comprising the nucleic acid according to claim 13.

15. Use of a Cytochrome P450 BM3 monooxygenase (BM3) variant for the production of a compound according to formula I wherein R¹ and R² form a six-membered ring as part of a steroid or steroid derivative. [chemical structure]
.

16. Use of a BM3 variant according to claim 15, wherein said compound according to formula I is estrone or estradiol.

17. Use of a BM3 variant for the C19-hydroxylation of a steroid or steroid derivative, said steroid or steroid derivative comprising a 1,4-dien-3-one-A-ring or 4-en-3-one-A-ring.

18. Use of a BM3 variant for the C19-hydroxylation of a steroid according to claim 17, wherein said steroid derivative is androsta-1,4-dien-3,17-dione (ADD) or (17beta)-17-hydroxyandrosta-1,4-dien-3-one (delta1 testosterone).

19. Use of a BM3 variant according to claim 15, wherein the BM3 variant comprises the mutation F87A and at least one and preferably two further mutations selected from
(i) a mutation at position V78, preferably V78F, V78Y, V78M, V78I or V78L, and
(ii) a mutation at position A82, preferably A82E, A82Q or A82P,
wherein the BM3 variant catalyzes the C19 hydroxylation of a steroid or steroid derivative.

20. A process for C19-hydroxylation of a steroid derivative comprising (i)
a) culturing a recombinant Cytochrome P450 BM3 monooxygenase (BM3) variant producing microorganism in a culture medium, in the presence of an exogenous or intermediately formed substrate; or
b) incubating a substrate-containing reaction medium with a BM3 variant;
and (ii) isolating from the medium the C19 hydroxylation product formed or a secondary product thereof;
optionally further characterized in that said BM3 variant is a BM3 variant according to claim 1.

21. The process according to claim 20, wherein the steroid derivative comprises a 1,4-dien-3-one-A-ring or a 4-en-3-one-A-ring and a 19-methyl group.

22. A method for obtaining optimized BM3 variants for the C19 hydroxylation of steroids, said method comprising
(i) (a) culturing a recombinant microorganism expressing a BM3 variant (test variant) in a culture medium, in the presence of an exogenous or intermediately formed steroid or steroid derivative; or
(b) incubating a steroid or steroid derivative-containing reaction medium with a BM3 variant (test variant); and
(ii) Comparing the obtained product yield or titer and/or selectivity for the C19 hydroxylation product formed by the test variant or a secondary product thereof with the respective value obtained for a parent variant of the test variant capable of catalyzing the C19 hydroxylation of a steroid, and
(iii) Selecting the test variant as optimized for the C19 hydroxylation of steroids, if the test variant has an improved product yield or titer and/or selectivity compared to the parent variant.

The application's sequence listing, which the Patent Office published only in electronic form, follows.

SEQUENCE LISTING (173 sequences)

SEQ ID NO: 1 - protein, 1048 aa, Artificial Sequence
  BM3 WT
AIKEMPQPKTFGELKNLPLLNTDKPVQALMKIADELGEIFKFEAPGRVTRYLSSQRLIKEACDESRFDKNLSQALKFVRDFAGDGLFTSWTHEKNWKKAHNILLPSFSQQAMKGYHAMMVDIAVQLVQKWERLNADEHIEVPEDMTRLTLDTIGLCGFNYRFNSFYRDQPHPFITSMVRALDEAMNKLQRANPDDPAYDENKRQFQEDIKVMNDLVDKIIADRKASGEQSDDLLTHMLNGKDPETGEPLDDENIRYQIITFLIAGHETTSGLLSFALYFLVKNPHVLQKAAEEAARVLVDPVPSYKQVKQLKYVGMVLNEALRLWPTAPAFSLYAKEDTVLGGEYPLEKGDELMVLIPQLHRDKTIWGDDVEEFRPERFENPSAIPQHAFKPFGNGQRACIGQQFALHEATLVLGMMLKHFDFEDHTNYELDIKETLTLKPEGFVVKAKSKKIPLGGIPSPSTEQSAKKVRKKAENAHNTPLLVLYGSNMGTAEGTARDLADIAMSKGFAPQVATLDSHAGNLPREGAVLIVTASYNGHPPDNAKQFVDWLDQASADEVKGVRYSVFGCGDKNWATTYQKVPAFIDETLAAKGAENIADRGEADASDDFEGTYEEWREHMWSDVAAYFNLDIENSEDNKSTLSLQFVDSAADMPLAKMHGAFSTNVVASKELQQPGSARSTRHLEIELPKEASYQEGDHLGVIPRNYEGIVNRVTARFGLDASQQIRLEAEEEKLAHLPLAKTVSVEELLQYVELQDPVTRTQLRAMAAKTVCPPHKVELEALLEKQAYKEQVLAKRLTMLELLEKYPACEMKFSEFIALLPSIRPRYYSISSSPRVDEKQASITVSVVSGEAWSGYGEYKGIASNYLAELQEGDTITCFISTPQSEFTLPKDPETPLIMVGPGTGVAPFRGFVQARKQLKEQGQSLGEAHLYFGCRSPHEDYLYQEELENAQSEGIITLHTAFSRMPNQPKTYVQHVMEQDGKKLIELLDQGAHFYICGDGSQMAPAVEATLMKSYADVHQVSEADARLWLQQLEEKGRYAKDVWAG

SEQ ID NO: 2 - protein, 1048 aa, Artificial Sequence
  BM3-254 (V78Y, A82E, F87A)
AIKEMPQPKTFGELKNLPLLNTDKPVQALMKIADELGEIFKFEAPGRVTRYLSSQRLIKEACDESRFDKNLSQALKFYRDFEGDGLATSWTHEKNWKKAHNILLPSFSQQAMKGYHAMMVDIAVQLVQKWERLNADEHIEVPEDMTRLTLDTIGLCGFNYRFNSFYRDQPHPFITSMVRALDEAMNKLQRANPDDPAYDENKRQFQEDIKVMNDLVDKIIADRKASGEQSDDLLTHMLNGKDPETGEPLDDENIRYQIITFLIAGHETTSGLLSFALYFLVKNPHVLQKAAEEAARVLVDPVPSYKQVKQLKYVGMVLNEALRLWPTAPAFSLYAKEDTVLGGEYPLEKGDELMVLIPQLHRDKTIWGDDVEEFRPERFENPSAIPQHAFKPFGNGQRACIGQQFALHEATLVLGMMLKHFDFEDHTNYELDIKETLTLKPEGFVVKAKSKKIPLGGIPSPSTEQSAKKVRKKAENAHNTPLLVLYGSNMGTAEGTARDLADIAMSKGFAPQVATLDSHAGNLPREGAVLIVTASYNGHPPDNAKQFVDWLDQASADEVKGVRYSVFGCGDKNWATTYQKVPAFIDETLAAKGAENIADRGEADASDDFEGTYEEWREHMWSDVAAYFNLDIENSEDNKSTLSLQFVDSAADMPLAKMHGAFSTNVVASKELQQPGSARSTRHLEIELPKEASYQEGDHLGVIPRNYEGIVNRVTARFGLDASQQIRLEAEEEKLAHLPLAKTVSVEELLQYVELQDPVTRTQLRAMAAKTVCPPHKVELEALLEKQAYKEQVLAKRLTMLELLEKYPACEMKFSEFIALLPSIRPRYYSISSSPRVDEKQASITVSVVSGEAWSGYGEYKGIASNYLAELQEGDTITCFISTPQSEFTLPKDPETPLIMVGPGTGVAPFRGFVQARKQLKEQGQSLGEAHLYFGCRSPHEDYLYQEELENAQSEGIITLHTAFSRMPNQPKTYVQHVMEQDGKKLIELLDQGAHFYICGDGSQMAPAVEATLMKSYADVHQVSEADARLWLQQLEEKGRYAKDVWAG

SEQ ID NO: 3 - protein, 1048 aa, Artificial Sequence
  BM3-263 (V78M, A82E, F87A)
AIKEMPQPKTFGELKNLPLLNTDKPVQALMKIADELGEIFKFEAPGRVTRYLSSQRLIKEACDESRFDKNLSQALKFMRDFEGDGLATSWTHEKNWKKAHNILLPSFSQQAMKGYHAMMVDIAVQLVQKWERLNADEHIEVPEDMTRLTLDTIGLCGFNYRFNSFYRDQPHPFITSMVRALDEAMNKLQRANPDDPAYDENKRQFQEDIKVMNDLVDKIIADRKASGEQSDDLLTHMLNGKDPETGEPLDDENIRYQIITFLIAGHETTSGLLSFALYFLVKNPHVLQKAAEEAARVLVDPVPSYKQVKQLKYVGMVLNEALRLWPTAPAFSLYAKEDTVLGGEYPLEKGDELMVLIPQLHRDKTIWGDDVEEFRPERFENPSAIPQHAFKPFGNGQRACIGQQFALHEATLVLGMMLKHFDFEDHTNYELDIKETLTLKPEGFVVKAKSKKIPLGGIPSPSTEQSAKKVRKKAENAHNTPLLVLYGSNMGTAEGTARDLADIAMSKGFAPQVATLDSHAGNLPREGAVLIVTASYNGHPPDNAKQFVDWLDQASADEVKGVRYSVFGCGDKNWATTYQKVPAFIDETLAAKGAENIADRGEADASDDFEGTYEEWREHMWSDVAAYFNLDIENSEDNKSTLSLQFVDSAADMPLAKMHGAFSTNVVASKELQQPGSARSTRHLEIELPKEASYQEGDHLGVIPRNYEGIVNRVTARFGLDASQQIRLEAEEEKLAHLPLAKTVSVEELLQYVELQDPVTRTQLRAMAAKTVCPPHKVELEALLEKQAYKEQVLAKRLTMLELLEKYPACEMKFSEFIALLPSIRPRYYSISSSPRVDEKQASITVSVVSGEAWSGYGEYKGIASNYLAELQEGDTITCFISTPQSEFTLPKDPETPLIMVGPGTGVAPFRGFVQARKQLKEQGQSLGEAHLYFGCRSPHEDYLYQEELENAQSEGIITLHTAFSRMPNQPKTYVQHVMEQDGKKLIELLDQGAHFYICGDGSQMAPAVEATLMKSYADVHQVSEADARLWLQQLEEKGRYAKDVWAG

SEQ ID NO: 4 - protein, 1048 aa, Artificial Sequence
  BM3-268 (V78I, A82E, F87A)
AIKEMPQPKTFGELKNLPLLNTDKPVQALMKIADELGEIFKFEAPGRVTRYLSSQRLIKEACDESRFDKNLSQALKFIRDFEGDGLATSWTHEKNWKKAHNILLPSFSQQAMKGYHAMMVDIAVQLVQKWERLNADEHIEVPEDMTRLTLDTIGLCGFNYRFNSFYRDQPHPFITSMVRALDEAMNKLQRANPDDPAYDENKRQFQEDIKVMNDLVDKIIADRKASGEQSDDLLTHMLNGKDPETGEPLDDENIRYQIITFLIAGHETTSGLLSFALYFLVKNPHVLQKAAEEAARVLVDPVPSYKQVKQLKYVGMVLNEALRLWPTAPAFSLYAKEDTVLGGEYPLEKGDELMVLIPQLHRDKTIWGDDVEEFRPERFENPSAIPQHAFKPFGNGQRACIGQQFALHEATLVLGMMLKHFDFEDHTNYELDIKETLTLKPEGFVVKAKSKKIPLGGIPSPSTEQSAKKVRKKAENAHNTPLLVLYGSNMGTAEGTARDLADIAMSKGFAPQVATLDSHAGNLPREGAVLIVTASYNGHPPDNAKQFVDWLDQASADEVKGVRYSVFGCGDKNWATTYQKVPAFIDETLAAKGAENIADRGEADASDDFEGTYEEWREHMWSDVAAYFNLDIENSEDNKSTLSLQFVDSAADMPLAKMHGAFSTNVVASKELQQPGSARSTRHLEIELPKEASYQEGDHLGVIPRNYEGIVNRVTARFGLDASQQIRLEAEEEKLAHLPLAKTVSVEELLQYVELQDPVTRTQLRAMAAKTVCPPHKVELEALLEKQAYKEQVLAKRLTMLELLEKYPACEMKFSEFIALLPSIRPRYYSISSSPRVDEKQASITVSVVSGEAWSGYGEYKGIASNYLAELQEGDTITCFISTPQSEFTLPKDPETPLIMVGPGTGVAPFRGFVQARKQLKEQGQSLGEAHLYFGCRSPHEDYLYQEELENAQSEGIITLHTAFSRMPNQPKTYVQHVMEQDGKKLIELLDQGAHFYICGDGSQMAPAVEATLMKSYADVHQVSEADARLWLQQLEEKGRYAKDVWAG

SEQ ID NO: 5 - protein, 1048 aa, Artificial Sequence
  BM3 variant (V78L, A82E, F87A)
AIKEMPQPKTFGELKNLPLLNTDKPVQALMKIADELGEIFKFEAPGRVTRYLSSQRLIKEACDESRFDKNLSQALKFLRDFEGDGLATSWTHEKNWKKAHNILLPSFSQQAMKGYHAMMVDIAVQLVQKWERLNADEHIEVPEDMTRLTLDTIGLCGFNYRFNSFYRDQPHPFITSMVRALDEAMNKLQRANPDDPAYDENKRQFQEDIKVMNDLVDKIIADRKASGEQSDDLLTHMLNGKDPETGEPLDDENIRYQIITFLIAGHETTSGLLSFALYFLVKNPHVLQKAAEEAARVLVDPVPSYKQVKQLKYVGMVLNEALRLWPTAPAFSLYAKEDTVLGGEYPLEKGDELMVLIPQLHRDKTIWGDDVEEFRPERFENPSAIPQHAFKPFGNGQRACIGQQFALHEATLVLGMMLKHFDFEDHTNYELDIKETLTLKPEGFVVKAKSKKIPLGGIPSPSTEQSAKKVRKKAENAHNTPLLVLYGSNMGTAEGTARDLADIAMSKGFAPQVATLDSHAGNLPREGAVLIVTASYNGHPPDNAKQFVDWLDQASADEVKGVRYSVFGCGDKNWATTYQKVPAFIDETLAAKGAENIADRGEADASDDFEGTYEEWREHMWSDVAAYFNLDIENSEDNKSTLSLQFVDSAADMPLAKMHGAFSTNVVASKELQQPGSARSTRHLEIELPKEASYQEGDHLGVIPRNYEGIVNRVTARFGLDASQQIRLEAEEEKLAHLPLAKTVSVEELLQYVELQDPVTRTQLRAMAAKTVCPPHKVELEALLEKQAYKEQVLAKRLTMLELLEKYPACEMKFSEFIALLPSIRPRYYSISSSPRVDEKQASITVSVVSGEAWSGYGEYKGIASNYLAELQEGDTITCFISTPQSEFTLPKDPETPLIMVGPGTGVAPFRGFVQARKQLKEQGQSLGEAHLYFGCRSPHEDYLYQEELENAQSEGIITLHTAFSRMPNQPKTYVQHVMEQDGKKLIELLDQGAHFYICGDGSQMAPAVEATLMKSYADVHQVSEADARLWLQQLEEKGRYAKDVWAG

SEQ ID NO: 6 - protein, 1048 aa, Artificial Sequence
  BM3 variant (V78Y, A82P, F87A)
AIKEMPQPKTFGELKNLPLLNTDKPVQALMKIADELGEIFKFEAPGRVTRYLSSQRLIKEACDESRFDKNLSQALKFYRDFPGDGLATSWTHEKNWKKAHNILLPSFSQQAMKGYHAMMVDIAVQLVQKWERLNADEHIEVPEDMTRLTLDTIGLCGFNYRFNSFYRDQPHPFITSMVRALDEAMNKLQRANPDDPAYDENKRQFQEDIKVMNDLVDKIIADRKASGEQSDDLLTHMLNGKDPETGEPLDDENIRYQIITFLIAGHETTSGLLSFALYFLVKNPHVLQKAAEEAARVLVDPVPSYKQVKQLKYVGMVLNEALRLWPTAPAFSLYAKEDTVLGGEYPLEKGDELMVLIPQLHRDKTIWGDDVEEFRPERFENPSAIPQHAFKPFGNGQRACIGQQFALHEATLVLGMMLKHFDFEDHTNYELDIKETLTLKPEGFVVKAKSKKIPLGGIPSPSTEQSAKKVRKKAENAHNTPLLVLYGSNMGTAEGTARDLADIAMSKGFAPQVATLDSHAGNLPREGAVLIVTASYNGHPPDNAKQFVDWLDQASADEVKGVRYSVFGCGDKNWATTYQKVPAFIDETLAAKGAENIADRGEADASDDFEGTYEEWREHMWSDVAAYFNLDIENSEDNKSTLSLQFVDSAADMPLAKMHGAFSTNVVASKELQQPGSARSTRHLEIELPKEASYQEGDHLGVIPRNYEGIVNRVTARFGLDASQQIRLEAEEEKLAHLPLAKTVSVEELLQYVELQDPVTRTQLRAMAAKTVCPPHKVELEALLEKQAYKEQVLAKRLTMLELLEKYPACEMKFSEFIALLPSIRPRYYSISSSPRVDEKQASITVSVVSGEAWSGYGEYKGIASNYLAELQEGDTITCFISTPQSEFTLPKDPETPLIMVGPGTGVAPFRGFVQARKQLKEQGQSLGEAHLYFGCRSPHEDYLYQEELENAQSEGIITLHTAFSRMPNQPKTYVQHVMEQDGKKLIELLDQGAHFYICGDGSQMAPAVEATLMKSYADVHQVSEADARLWLQQLEEKGRYAKDVWAG

SEQ ID NO: 7 - protein, 1048 aa, Artificial Sequence
  BM3 variant (V78M, A82P, F87A)
AIKEMPQPKTFGELKNLPLLNTDKPVQALMKIADELGEIFKFEAPGRVTRYLSSQRLIKEACDESRFDKNLSQALKFMRDFPGDGLATSWTHEKNWKKAHNILLPSFSQQAMKGYHAMMVDIAVQLVQKWERLNADEHIEVPEDMTRLTLDTIGLCGFNYRFNSFYRDQPHPFITSMVRALDEAMNKLQRANPDDPAYDENKRQFQEDIKVMNDLVDKIIADRKASGEQSDDLLTHMLNGKDPETGEPLDDENIRYQIITFLIAGHETTSGLLSFALYFLVKNPHVLQKAAEEAARVLVDPVPSYKQVKQLKYVGMVLNEALRLWPTAPAFSLYAKEDTVLGGEYPLEKGDELMVLIPQLHRDKTIWGDDVEEFRPERFENPSAIPQHAFKPFGNGQRACIGQQFALHEATLVLGMMLKHFDFEDHTNYELDIKETLTLKPEGFVVKAKSKKIPLGGIPSPSTEQSAKKVRKKAENAHNTPLLVLYGSNMGTAEGTARDLADIAMSKGFAPQVATLDSHAGNLPREGAVLIVTASYNGHPPDNAKQFVDWLDQASADEVKGVRYSVFGCGDKNWATTYQKVPAFIDETLAAKGAENIADRGEADASDDFEGTYEEWREHMWSDVAAYFNLDIENSEDNKSTLSLQFVDSAADMPLAKMHGAFSTNVVASKELQQPGSARSTRHLEIELPKEASYQEGDHLGVIPRNYEGIVNRVTARFGLDASQQIRLEAEEEKLAHLPLAKTVSVEELLQYVELQDPVTRTQLRAMAAKTVCPPHKVELEALLEKQAYKEQVLAKRLTMLELLEKYPACEMKFSEFIALLPSIRPRYYSISSSPRVDEKQASITVSVVSGEAWSGYGEYKGIASNYLAELQEGDTITCFISTPQSEFTLPKDPETPLIMVGPGTGVAPFRGFVQARKQLKEQGQSLGEAHLYFGCRSPHEDYLYQEELENAQSEGIITLHTAFSRMPNQPKTYVQHVMEQDGKKLIELLDQGAHFYICGDGSQMAPAVEATLMKSYADVHQVSEADARLWLQQLEEKGRYAKDVWAG

SEQ ID NO: 8 - protein, 1048 aa, Artificial Sequence
  BM3 variant (V78I, A82P, F87A)
AIKEMPQPKTFGELKNLPLLNTDKPVQALMKIADELGEIFKFEAPGRVTRYLSSQRLIKEACDESRFDKNLSQALKFIRDFPGDGLATSWTHEKNWKKAHNILLPSFSQQAMKGYHAMMVDIAVQLVQKWERLNADEHIEVPEDMTRLTLDTIGLCGFNYRFNSFYRDQPHPFITSMVRALDEAMNKLQRANPDDPAYDENKRQFQEDIKVMNDLVDKIIADRKASGEQSDDLLTHMLNGKDPETGEPLDDENIRYQIITFLIAGHETTSGLLSFALYFLVKNPHVLQKAAEEAARVLVDPVPSYKQVKQLKYVGMVLNEALRLWPTAPAFSLYAKEDTVLGGEYPLEKGDELMVLIPQLHRDKTIWGDDVEEFRPERFENPSAIPQHAFKPFGNGQRACIGQQFALHEATLVLGMMLKHFDFEDHTNYELDIKETLTLKPEGFVVKAKSKKIPLGGIPSPSTEQSAKKVRKKAENAHNTPLLVLYGSNMGTAEGTARDLADIAMSKGFAPQVATLDSHAGNLPREGAVLIVTASYNGHPPDNAKQFVDWLDQASADEVKGVRYSVFGCGDKNWATTYQKVPAFIDETLAAKGAENIADRGEADASDDFEGTYEEWREHMWSDVAAYFNLDIENSEDNKSTLSLQFVDSAADMPLAKMHGAFSTNVVASKELQQPGSARSTRHLEIELPKEASYQEGDHLGVIPRNYEGIVNRVTARFGLDASQQIRLEAEEEKLAHLPLAKTVSVEELLQYVELQDPVTRTQLRAMAAKTVCPPHKVELEALLEKQAYKEQVLAKRLTMLELLEKYPACEMKFSEFIALLPSIRPRYYSISSSPRVDEKQASITVSVVSGEAWSGYGEYKGIASNYLAELQEGDTITCFISTPQSEFTLPKDPETPLIMVGPGTGVAPFRGFVQARKQLKEQGQSLGEAHLYFGCRSPHEDYLYQEELENAQSEGIITLHTAFSRMPNQPKTYVQHVMEQDGKKLIELLDQGAHFYICGDGSQMAPAVEATLMKSYADVHQVSEADARLWLQQLEEKGRYAKDVWAG

SEQ ID NO: 9 - protein, 1048 aa, Artificial Sequence
  BM3 variant (V78L, A82P, F87A)
AIKEMPQPKTFGELKNLPLLNTDKPVQALMKIADELGEIFKFEAPGRVTRYLSSQRLIKEACDESRFDKNLSQALKFLRDFPGDGLATSWTHEKNWKKAHNILLPSFSQQAMKGYHAMMVDIAVQLVQKWERLNADEHIEVPEDMTRLTLDTIGLCGFNYRFNSFYRDQPHPFITSMVRALDEAMNKLQRANPDDPAYDENKRQFQEDIKVMNDLVDKIIADRKASGEQSDDLLTHMLNGKDPETGEPLDDENIRYQIITFLIAGHETTSGLLSFALYFLVKNPHVLQKAAEEAARVLVDPVPSYKQVKQLKYVGMVLNEALRLWPTAPAFSLYAKEDTVLGGEYPLEKGDELMVLIPQLHRDKTIWGDDVEEFRPERFENPSAIPQHAFKPFGNGQRACIGQQFALHEATLVLGMMLKHFDFEDHTNYELDIKETLTLKPEGFVVKAKSKKIPLGGIPSPSTEQSAKKVRKKAENAHNTPLLVLYGSNMGTAEGTARDLADIAMSKGFAPQVATLDSHAGNLPREGAVLIVTASYNGHPPDNAKQFVDWLDQASADEVKGVRYSVFGCGDKNWATTYQKVPAFIDETLAAKGAENIADRGEADASDDFEGTYEEWREHMWSDVAAYFNLDIENSEDNKSTLSLQFVDSAADMPLAKMHGAFSTNVVASKELQQPGSARSTRHLEIELPKEASYQEGDHLGVIPRNYEGIVNRVTARFGLDASQQIRLEAEEEKLAHLPLAKTVSVEELLQYVELQDPVTRTQLRAMAAKTVCPPHKVELEALLEKQAYKEQVLAKRLTMLELLEKYPACEMKFSEFIALLPSIRPRYYSISSSPRVDEKQASITVSVVSGEAWSGYGEYKGIASNYLAELQEGDTITCFISTPQSEFTLPKDPETPLIMVGPGTGVAPFRGFVQARKQLKEQGQSLGEAHLYFGCRSPHEDYLYQEELENAQSEGIITLHTAFSRMPNQPKTYVQHVMEQDGKKLIELLDQGAHFYICGDGSQMAPAVEATLMKSYADVHQVSEADARLWLQQLEEKGRYAKDVWAG

SEQ ID NO: 10 - protein, 1048 aa, Artificial Sequence
  BM3 variant (V78Y, A82Q, F87A)
AIKEMPQPKTFGELKNLPLLNTDKPVQALMKIADELGEIFKFEAPGRVTRYLSSQRLIKEACDESRFDKNLSQALKFYRDFQGDGLATSWTHEKNWKKAHNILLPSFSQQAMKGYHAMMVDIAVQLVQKWERLNADEHIEVPEDMTRLTLDTIGLCGFNYRFNSFYRDQPHPFITSMVRALDEAMNKLQRANPDDPAYDENKRQFQEDIKVMNDLVDKIIADRKASGEQSDDLLTHMLNGKDPETGEPLDDENIRYQIITFLIAGHETTSGLLSFALYFLVKNPHVLQKAAEEAARVLVDPVPSYKQVKQLKYVGMVLNEALRLWPTAPAFSLYAKEDTVLGGEYPLEKGDELMVLIPQLHRDKTIWGDDVEEFRPERFENPSAIPQHAFKPFGNGQRACIGQQFALHEATLVLGMMLKHFDFEDHTNYELDIKETLTLKPEGFVVKAKSKKIPLGGIPSPSTEQSAKKVRKKAENAHNTPLLVLYGSNMGTAEGTARDLADIAMSKGFAPQVATLDSHAGNLPREGAVLIVTASYNGHPPDNAKQFVDWLDQASADEVKGVRYSVFGCGDKNWATTYQKVPAFIDETLAAKGAENIADRGEADASDDFEGTYEEWREHMWSDVAAYFNLDIENSEDNKSTLSLQFVDSAADMPLAKMHGAFSTNVVASKELQQPGSARSTRHLEIELPKEASYQEGDHLGVIPRNYEGIVNRVTARFGLDASQQIRLEAEEEKLAHLPLAKTVSVEELLQYVELQDPVTRTQLRAMAAKTVCPPHKVELEALLEKQAYKEQVLAKRLTMLELLEKYPACEMKFSEFIALLPSIRPRYYSISSSPRVDEKQASITVSVVSGEAWSGYGEYKGIASNYLAELQEGDTITCFISTPQSEFTLPKDPETPLIMVGPGTGVAPFRGFVQARKQLKEQGQSLGEAHLYFGCRSPHEDYLYQEELENAQSEGIITLHTAFSRMPNQPKTYVQHVMEQDGKKLIELLDQGAHFYICGDGSQMAPAVEATLMKSYADVHQVSEADARLWLQQLEEKGRYAKDVWAG

SEQ ID NO: 11 - protein, 1048 aa, Artificial Sequence
  BM3 variant (V78M, A82Q, F87A)
AIKEMPQPKTFGELKNLPLLNTDKPVQALMKIADELGEIFKFEAPGRVTRYLSSQRLIKEACDESRFDKNLSQALKFMRDFQGDGLATSWTHEKNWKKAHNILLPSFSQQAMKGYHAMMVDIAVQLVQKWERLNADEHIEVPEDMTRLTLDTIGLCGFNYRFNSFYRDQPHPFITSMVRALDEAMNKLQRANPDDPAYDENKRQFQEDIKVMNDLVDKIIADRKASGEQSDDLLTHMLNGKDPETGEPLDDENIRYQIITFLIAGHETTSGLLSFALYFLVKNPHVLQKAAEEAARVLVDPVPSYKQVKQLKYVGMVLNEALRLWPTAPAFSLYAKEDTVLGGEYPLEKGDELMVLIPQLHRDKTIWGDDVEEFRPERFENPSAIPQHAFKPFGNGQRACIGQQFALHEATLVLGMMLKHFDFEDHTNYELDIKETLTLKPEGFVVKAKSKKIPLGGIPSPSTEQSAKKVRKKAENAHNTPLLVLYGSNMGTAEGTARDLADIAMSKGFAPQVATLDSHAGNLPREGAVLIVTASYNGHPPDNAKQFVDWLDQASADEVKGVRYSVFGCGDKNWATTYQKVPAFIDETLAAKGAENIADRGEADASDDFEGTYEEWREHMWSDVAAYFNLDIENSEDNKSTLSLQFVDSAADMPLAKMHGAFSTNVVASKELQQPGSARSTRHLEIELPKEASYQEGDHLGVIPRNYEGIVNRVTARFGLDASQQIRLEAEEEKLAHLPLAKTVSVEELLQYVELQDPVTRTQLRAMAAKTVCPPHKVELEALLEKQAYKEQVLAKRLTMLELLEKYPACEMKFSEFIALLPSIRPRYYSISSSPRVDEKQASITVSVVSGEAWSGYGEYKGIASNYLAELQEGDTITCFISTPQSEFTLPKDPETPLIMVGPGTGVAPFRGFVQARKQLKEQGQSLGEAHLYFGCRSPHEDYLYQEELENAQSEGIITLHTAFSRMPNQPKTYVQHVMEQDGKKLIELLDQGAHFYICGDGSQMAPAVEATLMKSYADVHQVSEADARLWLQQLEEKGRYAKDVWAG

SEQ ID NO: 12 - protein, 1048 aa, Artificial Sequence
  BM3 variant (V78I, A82Q, F87A)
AIKEMPQPKTFGELKNLPLLNTDKPVQALMKIADELGEIFKFEAPGRVTRYLSSQRLIKEACDESRFDKNLSQALKFIRDFQGDGLATSWTHEKNWKKAHNILLPSFSQQAMKGYHAMMVDIAVQLVQKWERLNADEHIEVPEDMTRLTLDTIGLCGFNYRFNSFYRDQPHPFITSMVRALDEAMNKLQRANPDDPAYDENKRQFQEDIKVMNDLVDKIIADRKASGEQSDDLLTHMLNGKDPETGEPLDDENIRYQIITFLIAGHETTSGLLSFALYFLVKNPHVLQKAAEEAARVLVDPVPSYKQVKQLKYVGMVLNEALRLWPTAPAFSLYAKEDTVLGGEYPLEKGDELMVLIPQLHRDKTIWGDDVEEFRPERFENPSAIPQHAFKPFGNGQRACIGQQFALHEATLVLGMMLKHFDFEDHTNYELDIKETLTLKPEGFVVKAKSKKIPLGGIPSPSTEQSAKKVRKKAENAHNTPLLVLYGSNMGTAEGTARDLADIAMSKGFAPQVATLDSHAGNLPREGAVLIVTASYNGHPPDNAKQFVDWLDQASADEVKGVRYSVFGCGDKNWATTYQKVPAFIDETLAAKGAENIADRGEADASDDFEGTYEEWREHMWSDVAAYFNLDIENSEDNKSTLSLQFVDSAADMPLAKMHGAFSTNVVASKELQQPGSARSTRHLEIELPKEASYQEGDHLGVIPRNYEGIVNRVTARFGLDASQQIRLEAEEEKLAHLPLAKTVSVEELLQYVELQDPVTRTQLRAMAAKTVCPPHKVELEALLEKQAYKEQVLAKRLTMLELLEKYPACEMKFSEFIALLPSIRPRYYSISSSPRVDEKQASITVSVVSGEAWSGYGEYKGIASNYLAELQEGDTITCFISTPQSEFTLPKDPETPLIMVGPGTGVAPFRGFVQARKQLKEQGQSLGEAHLYFGCRSPHEDYLYQEELENAQSEGIITLHTAFSRMPNQPKTYVQHVMEQDGKKLIELLDQGAHFYICGDGSQMAPAVEATLMKSYADVHQVSEADARLWLQQLEEKGRYAKDVWAG

SEQ ID NO: 13 - protein, 1048 aa, Artificial Sequence
  BM3 variant (V78L, A82Q, F87A)
AIKEMPQPKTFGELKNLPLLNTDKPVQALMKIADELGEIFKFEAPGRVTRYLSSQRLIKEACDESRFDKNLSQALKFLRDFQGDGLATSWTHEKNWKKAHNILLPSFSQQAMKGYHAMMVDIAVQLVQKWERLNADEHIEVPEDMTRLTLDTIGLCGFNYRFNSFYRDQPHPFITSMVRALDEAMNKLQRANPDDPAYDENKRQFQEDIKVMNDLVDKIIADRKASGEQSDDLLTHMLNGKDPETGEPLDDENIRYQIITFLIAGHETTSGLLSFALYFLVKNPHVLQKAAEEAARVLVDPVPSYKQVKQLKYVGMVLNEALRLWPTAPAFSLYAKEDTVLGGEYPLEKGDELMVLIPQLHRDKTIWGDDVEEFRPERFENPSAIPQHAFKPFGNGQRACIGQQFALHEATLVLGMMLKHFDFEDHTNYELDIKETLTLKPEGFVVKAKSKKIPLGGIPSPSTEQSAKKVRKKAENAHNTPLLVLYGSNMGTAEGTARDLADIAMSKGFAPQVATLDSHAGNLPREGAVLIVTASYNGHPPDNAKQFVDWLDQASADEVKGVRYSVFGCGDKNWATTYQKVPAFIDETLAAKGAENIADRGEADASDDFEGTYEEWREHMWSDVAAYFNLDIENSEDNKSTLSLQFVDSAADMPLAKMHGAFSTNVVASKELQQPGSARSTRHLEIELPKEASYQEGDHLGVIPRNYEGIVNRVTARFGLDASQQIRLEAEEEKLAHLPLAKTVSVEELLQYVELQDPVTRTQLRAMAAKTVCPPHKVELEALLEKQAYKEQVLAKRLTMLELLEKYPACEMKFSEFIALLPSIRPRYYSISSSPRVDEKQASITVSVVSGEAWSGYGEYKGIASNYLAELQEGDTITCFISTPQSEFTLPKDPETPLIMVGPGTGVAPFRGFVQARKQLKEQGQSLGEAHLYFGCRSPHEDYLYQEELENAQSEGIITLHTAFSRMPNQPKTYVQHVMEQDGKKLIELLDQGAHFYICGDGSQMAPAVEATLMKSYADVHQVSEADARLWLQQLEEKGRYAKDVWAG

SEQ ID NO: 14 - protein, 1048 aa, Artificial Sequence
  BM3 variant (V78F, A82E, F87A, M177Y, A184Y)
AIKEMPQPKTFGELKNLPLLNTDKPVQALMKIADELGEIFKFEAPGRVTRYLSSQRLIKEACDESRFDKNLSQALKFFRDFEGDGLATSWTHEKNWKKAHNILLPSFSQQAMKGYHAMMVDIAVQLVQKWERLNADEHIEVPEDMTRLTLDTIGLCGFNYRFNSFYRDQPHPFITSYVRALDEYMNKLQRANPDDPAYDENKRQFQEDIKVMNDLVDKIIADRKASGEQSDDLLTHMLNGKDPETGEPLDDENIRYQIITFLIAGHETTSGLLSFALYFLVKNPHVLQKAAEEAARVLVDPVPSYKQVKQLKYVGMVLNEALRLWPTAPAFSLYAKEDTVLGGEYPLEKGDELMVLIPQLHRDKTIWGDDVEEFRPERFENPSAIPQHAFKPFGNGQRACIGQQFALHEATLVLGMMLKHFDFEDHTNYELDIKETLTLKPEGFVVKAKSKKIPLGGIPSPSTEQSAKKVRKKAENAHNTPLLVLYGSNMGTAEGTARDLADIAMSKGFAPQVATLDSHAGNLPREGAVLIVTASYNGHPPDNAKQFVDWLDQASADEVKGVRYSVFGCGDKNWATTYQKVPAFIDETLAAKGAENIADRGEADASDDFEGTYEEWREHMWSDVAAYFNLDIENSEDNKSTLSLQFVDSAADMPLAKMHGAFSTNVVASKELQQPGSARSTRHLEIELPKEASYQEGDHLGVIPRNYEGIVNRVTARFGLDASQQIRLEAEEEKLAHLPLAKTVSVEELLQYVELQDPVTRTQLRAMAAKTVCPPHKVELEALLEKQAYKEQVLAKRLTMLELLEKYPACEMKFSEFIALLPSIRPRYYSISSSPRVDEKQASITVSVVSGEAWSGYGEYKGIASNYLAELQEGDTITCFISTPQSEFTLPKDPETPLIMVGPGTGVAPFRGFVQARKQLKEQGQSLGEAHLYFGCRSPHEDYLYQEELENAQSEGIITLHTAFSRMPNQPKTYVQHVMEQDGKKLIELLDQGAHFYICGDGSQMAPAVEATLMKSYADVHQVSEADARLWLQQLEEKGRYAKDVWAG

SEQ ID NO: 15 - protein, 1048 aa, Artificial Sequence
  BM3 variant (V78L, A82E, F87A, M177Y, A184Y)
AIKEMPQPKTFGELKNLPLLNTDKPVQALMKIADELGEIFKFEAPGRVTRYLSSQRLIKEACDESRFDKNLSQALKFLRDFEGDGLATSWTHEKNWKKAHNILLPSFSQQAMKGYHAMMVDIAVQLVQKWERLNADEHIEVPEDMTRLTLDTIGLCGFNYRFNSFYRDQPHPFITSYVRALDEYMNKLQRANPDDPAYDENKRQFQEDIKVMNDLVDKIIADRKASGEQSDDLLTHMLNGKDPETGEPLDDENIRYQIITFLIAGHETTSGLLSFALYFLVKNPHVLQKAAEEAARVLVDPVPSYKQVKQLKYVGMVLNEALRLWPTAPAFSLYAKEDTVLGGEYPLEKGDELMVLIPQLHRDKTIWGDDVEEFRPERFENPSAIPQHAFKPFGNGQRACIGQQFALHEATLVLGMMLKHFDFEDHTNYELDIKETLTLKPEGFVVKAKSKKIPLGGIPSPSTEQSAKKVRKKAENAHNTPLLVLYGSNMGTAEGTARDLADIAMSKGFAPQVATLDSHAGNLPREGAVLIVTASYNGHPPDNAKQFVDWLDQASADEVKGVRYSVFGCGDKNWATTYQKVPAFIDETLAAKGAENIADRGEADASDDFEGTYEEWREHMWSDVAAYFNLDIENSEDNKSTLSLQFVDSAADMPLAKMHGAFSTNVVASKELQQPGSARSTRHLEIELPKEASYQEGDHLGVIPRNYEGIVNRVTARFGLDASQQIRLEAEEEKLAHLPLAKTVSVEELLQYVELQDPVTRTQLRAMAAKTVCPPHKVELEALLEKQAYKEQVLAKRLTMLELLEKYPACEMKFSEFIALLPSIRPRYYSISSSPRVDEKQASITVSVVSGEAWSGYGEYKGIASNYLAELQEGDTITCFISTPQSEFTLPKDPETPLIMVGPGTGVAPFRGFVQARKQLKEQGQSLGEAHLYFGCRSPHEDYLYQEELENAQSEGIITLHTAFSRMPNQPKTYVQHVMEQDGKKLIELLDQGAHFYICGDGSQMAPAVEATLMKSYADVHQVSEADARLWLQQLEEKGRYAKDVWAG

SEQ ID NO: 16 - protein, 1048 aa, Artificial Sequence
  BM3 variant (V78I, A82E, F87A, M177Y, A184Y)
AIKEMPQPKTFGELKNLPLLNTDKPVQALMKIADELGEIFKFEAPGRVTRYLSSQRLIKEACDESRFDKNLSQALKFIRDFEGDGLATSWTHEKNWKKAHNILLPSFSQQAMKGYHAMMVDIAVQLVQKWERLNADEHIEVPEDMTRLTLDTIGLCGFNYRFNSFYRDQPHPFITSYVRALDEYMNKLQRANPDDPAYDENKRQFQEDIKVMNDLVDKIIADRKASGEQSDDLLTHMLNGKDPETGEPLDDENIRYQIITFLIAGHETTSGLLSFALYFLVKNPHVLQKAAEEAARVLVDPVPSYKQVKQLKYVGMVLNEALRLWPTAPAFSLYAKEDTVLGGEYPLEKGDELMVLIPQLHRDKTIWGDDVEEFRPERFENPSAIPQHAFKPFGNGQRACIGQQFALHEATLVLGMMLKHFDFEDHTNYELDIKETLTLKPEGFVVKAKSKKIPLGGIPSPSTEQSAKKVRKKAENAHNTPLLVLYGSNMGTAEGTARDLADIAMSKGFAPQVATLDSHAGNLPREGAVLIVTASYNGHPPDNAKQFVDWLDQASADEVKGVRYSVFGCGDKNWATTYQKVPAFIDETLAAKGAENIADRGEADASDDFEGTYEEWREHMWSDVAAYFNLDIENSEDNKSTLSLQFVDSAADMPLAKMHGAFSTNVVASKELQQPGSARSTRHLEIELPKEASYQEGDHLGVIPRNYEGIVNRVTARFGLDASQQIRLEAEEEKLAHLPLAKTVSVEELLQYVELQDPVTRTQLRAMAAKTVCPPHKVELEALLEKQAYKEQVLAKRLTMLELLEKYPACEMKFSEFIALLPSIRPRYYSISSSPRVDEKQASITVSVVSGEAWSGYGEYKGIASNYLAELQEGDTITCFISTPQSEFTLPKDPETPLIMVGPGTGVAPFRGFVQARKQLKEQGQSLGEAHLYFGCRSPHEDYLYQEELENAQSEGIITLHTAFSRMPNQPKTYVQHVMEQDGKKLIELLDQGAHFYICGDGSQMAPAVEATLMKSYADVHQVSEADARLWLQQLEEKGRYAKDVWAG

SEQ ID NO: 17 - protein, 1048 aa, Artificial Sequence
  BM3 variant (V78M, A82E, F87A, M177Y, A184Y)
AIKEMPQPKTFGELKNLPLLNTDKPVQALMKIADELGEIFKFEAPGRVTRYLSSQRLIKEACDESRFDKNLSQALKFMRDFEGDGLATSWTHEKNWKKAHNILLPSFSQQAMKGYHAMMVDIAVQLVQKWERLNADEHIEVPEDMTRLTLDTIGLCGFNYRFNSFYRDQPHPFITSYVRALDEYMNKLQRANPDDPAYDENKRQFQEDIKVMNDLVDKIIADRKASGEQSDDLLTHMLNGKDPETGEPLDDENIRYQIITFLIAGHETTSGLLSFALYFLVKNPHVLQKAAEEAARVLVDPVPSYKQVKQLKYVGMVLNEALRLWPTAPAFSLYAKEDTVLGGEYPLEKGDELMVLIPQLHRDKTIWGDDVEEFRPERFENPSAIPQHAFKPFGNGQRACIGQQFALHEATLVLGMMLKHFDFEDHTNYELDIKETLTLKPEGFVVKAKSKKIPLGGIPSPSTEQSAKKVRKKAENAHNTPLLVLYGSNMGTAEGTARDLADIAMSKGFAPQVATLDSHAGNLPREGAVLIVTASYNGHPPDNAKQFVDWLDQASADEVKGVRYSVFGCGDKNWATTYQKVPAFIDETLAAKGAENIADRGEADASDDFEGTYEEWREHMWSDVAAYFNLDIENSEDNKSTLSLQFVDSAADMPLAKMHGAFSTNVVASKELQQPGSARSTRHLEIELPKEASYQEGDHLGVIPRNYEGIVNRVTARFGLDASQQIRLEAEEEKLAHLPLAKTVSVEELLQYVELQDPVTRTQLRAMAAKTVCPPHKVELEALLEKQAYKEQVLAKRLTMLELLEKYPACEMKFSEFIALLPSIRPRYYSISSSPRVDEKQASITVSVVSGEAWSGYGEYKGIASNYLAELQEGDTITCFISTPQSEFTLPKDPETPLIMVGPGTGVAPFRGFVQARKQLKEQGQSLGEAHLYFGCRSPHEDYLYQEELENAQSEGIITLHTAFSRMPNQPKTYVQHVMEQDGKKLIELLDQGAHFYICGDGSQMAPAVEATLMKSYADVHQVSEADARLWLQQLEEKGRYAKDVWAG

SEQ ID NO: 18 - protein, 1048 aa, Artificial Sequence
  BM3 variant (V78Y, A82E, F87A, M177Y, A184Y)
AIKEMPQPKTFGELKNLPLLNTDKPVQALMKIADELGEIFKFEAPGRVTRYLSSQRLIKEACDESRFDKNLSQALKFYRDFEGDGLATSWTHEKNWKKAHNILLPSFSQQAMKGYHAMMVDIAVQLVQKWERLNADEHIEVPEDMTRLTLDTIGLCGFNYRFNSFYRDQPHPFITSYVRALDEYMNKLQRANPDDPAYDENKRQFQEDIKVMNDLVDKIIADRKASGEQSDDLLTHMLNGKDPETGEPLDDENIRYQIITFLIAGHETTSGLLSFALYFLVKNPHVLQKAAEEAARVLVDPVPSYKQVKQLKYVGMVLNEALRLWPTAPAFSLYAKEDTVLGGEYPLEKGDELMVLIPQLHRDKTIWGDDVEEFRPERFENPSAIPQHAFKPFGNGQRACIGQQFALHEATLVLGMMLKHFDFEDHTNYELDIKETLTLKPEGFVVKAKSKKIPLGGIPSPSTEQSAKKVRKKAENAHNTPLLVLYGSNMGTAEGTARDLADIAMSKGFAPQVATLDSHAGNLPREGAVLIVTASYNGHPPDNAKQFVDWLDQASADEVKGVRYSVFGCGDKNWATTYQKVPAFIDETLAAKGAENIADRGEADASDDFEGTYEEWREHMWSDVAAYFNLDIENSEDNKSTLSLQFVDSAADMPLAKMHGAFSTNVVASKELQQPGSARSTRHLEIELPKEASYQEGDHLGVIPRNYEGIVNRVTARFGLDASQQIRLEAEEEKLAHLPLAKTVSVEELLQYVELQDPVTRTQLRAMAAKTVCPPHKVELEALLEKQAYKEQVLAKRLTMLELLEKYPACEMKFSEFIALLPSIRPRYYSISSSPRVDEKQASITVSVVSGEAWSGYGEYKGIASNYLAELQEGDTITCFISTPQSEFTLPKDPETPLIMVGPGTGVAPFRGFVQARKQLKEQGQSLGEAHLYFGCRSPHEDYLYQEELENAQSEGIITLHTAFSRMPNQPKTYVQHVMEQDGKKLIELLDQGAHFYICGDGSQMAPAVEATLMKSYADVHQVSEADARLWLQQLEEKGRYAKDVWAG

SEQ ID NO: 19 - protein, 1048 aa, Artificial Sequence
  BM3 variant (V78F, A82P, F87A, M177Y, A184Y)
AIKEMPQPKTFGELKNLPLLNTDKPVQALMKIADELGEIFKFEAPGRVTRYLSSQRLIKEACDESRFDKNLSQALKFFRDFPGDGLATSWTHEKNWKKAHNILLPSFSQQAMKGYHAMMVDIAVQLVQKWERLNADEHIEVPEDMTRLTLDTIGLCGFNYRFNSFYRDQPHPFITSYVRALDEYMNKLQRANPDDPAYDENKRQFQEDIKVMNDLVDKIIADRKASGEQSDDLLTHMLNGKDPETGEPLDDENIRYQIITFLIAGHETTSGLLSFALYFLVKNPHVLQKAAEEAARVLVDPVPSYKQVKQLKYVGMVLNEALRLWPTAPAFSLYAKEDTVLGGEYPLEKGDELMVLIPQLHRDKTIWGDDVEEFRPERFENPSAIPQHAFKPFGNGQRACIGQQFALHEATLVLGMMLKHFDFEDHTNYELDIKETLTLKPEGFVVKAKSKKIPLGGIPSPSTEQSAKKVRKKAENAHNTPLLVLYGSNMGTAEGTARDLADIAMSKGFAPQVATLDSHAGNLPREGAVLIVTASYNGHPPDNAKQFVDWLDQASADEVKGVRYSVFGCGDKNWATTYQKVPAFIDETLAAKGAENIADRGEADASDDFEGTYEEWREHMWSDVAAYFNLDIENSEDNKSTLSLQFVDSAADMPLAKMHGAFSTNVVASKELQQPGSARSTRHLEIELPKEASYQEGDHLGVIPRNYEGIVNRVTARFGLDASQQIRLEAEEEKLAHLPLAKTVSVEELLQYVELQDPVTRTQLRAMAAKTVCPPHKVELEALLEKQAYKEQVLAKRLTMLELLEKYPACEMKFSEFIALLPSIRPRYYSISSSPRVDEKQASITVSVVSGEAWSGYGEYKGIASNYLAELQEGDTITCFISTPQSEFTLPKDPETPLIMVGPGTGVAPFRGFVQARKQLKEQGQSLGEAHLYFGCRSPHEDYLYQEELENAQSEGIITLHTAFSRMPNQPKTYVQHVMEQDGKKLIELLDQGAHFYICGDGSQMAPAVEATLMKSYADVHQVSEADARLWLQQLEEKGRYAKDVWAG

SEQ ID NO: 20 - protein, 1048 aa, Artificial Sequence
  BM3 variant (V78L, A82P, F87A, M177Y, A184Y)
AIKEMPQPKTFGELKNLPLLNTDKPVQALMKIADELGEIFKFEAPGRVTRYLSSQRLIKEACDESRFDKNLSQALKFLRDFPGDGLATSWTHEKNWKKAHNILLPSFSQQAMKGYHAMMVDIAVQLVQKWERLNADEHIEVPEDMTRLTLDTIGLCGFNYRFNSFYRDQPHPFITSYVRALDEYMNKLQRANPDDPAYDENKRQFQEDIKVMNDLVDKIIADRKASGEQSDDLLTHMLNGKDPETGEPLDDENIRYQIITFLIAGHETTSGLLSFALYFLVKNPHVLQKAAEEAARVLVDPVPSYKQVKQLKYVGMVLNEALRLWPTAPAFSLYAKEDTVLGGEYPLEKGDELMVLIPQLHRDKTIWGDDVEEFRPERFENPSAIPQHAFKPFGNGQRACIGQQFALHEATLVLGMMLKHFDFEDHTNYELDIKETLTLKPEGFVVKAKSKKIPLGGIPSPSTEQSAKKVRKKAENAHNTPLLVLYGSNMGTAEGTARDLADIAMSKGFAPQVATLDSHAGNLPREGAVLIVTASYNGHPPDNAKQFVDWLDQASADEVKGVRYSVFGCGDKNWATTYQKVPAFIDETLAAKGAENIADRGEADASDDFEGTYEEWREHMWSDVAAYFNLDIENSEDNKSTLSLQFVDSAADMPLAKMHGAFSTNVVASKELQQPGSARSTRHLEIELPKEASYQEGDHLGVIPRNYEGIVNRVTARFGLDASQQIRLEAEEEKLAHLPLAKTVSVEELLQYVELQDPVTRTQLRAMAAKTVCPPHKVELEALLEKQAYKEQVLAKRLTMLELLEKYPACEMKFSEFIALLPSIRPRYYSISSSPRVDEKQASITVSVVSGEAWSGYGEYKGIASNYLAELQEGDTITCFISTPQSEFTLPKDPETPLIMVGPGTGVAPFRGFVQARKQLKEQGQSLGEAHLYFGCRSPHEDYLYQEELENAQSEGIITLHTAFSRMPNQPKTYVQHVMEQDGKKLIELLDQGAHFYICGDGSQMAPAVEATLMKSYADVHQVSEADARLWLQQLEEKGRYAKDVWAG

SEQ ID NO: 21 - protein, 1048 aa, Artificial Sequence
  BM3 variant (V78I, A82P, F87A, M177Y, A184Y)
AIKEMPQPKTFGELKNLPLLNTDKPVQALMKIADELGEIFKFEAPGRVTRYLSSQRLIKEACDESRFDKNLSQALKFIRDFPGDGLATSWTHEKNWKKAHNILLPSFSQQAMKGYHAMMVDIAVQLVQKWERLNADEHIEVPEDMTRLTLDTIGLCGFNYRFNSFYRDQPHPFITSYVRALDEYMNKLQRANPDDPAYDENKRQFQEDIKVMNDLVDKIIADRKASGEQSDDLLTHMLNGKDPETGEPLDDENIRYQIITFLIAGHETTSGLLSFALYFLVKNPHVLQKAAEEAARVLVDPVPSYKQVKQLKYVGMVLNEALRLWPTAPAFSLYAKEDTVLGGEYPLEKGDELMVLIPQLHRDKTIWGDDVEEFRPERFENPSAIPQHAFKPFGNGQRACIGQQFALHEATLVLGMMLKHFDFEDHTNYELDIKETLTLKPEGFVVKAKSKKIPLGGIPSPSTEQSAKKVRKKAENAHNTPLLVLYGSNMGTAEGTARDLADIAMSKGFAPQVATLDSHAGNLPREGAVLIVTASYNGHPPDNAKQFVDWLDQASADEVKGVRYSVFGCGDKNWATTYQKVPAFIDETLAAKGAENIADRGEADASDDFEGTYEEWREHMWSDVAAYFNLDIENSEDNKSTLSLQFVDSAADMPLAKMHGAFSTNVVASKELQQPGSARSTRHLEIELPKEASYQEGDHLGVIPRNYEGIVNRVTARFGLDASQQIRLEAEEEKLAHLPLAKTVSVEELLQYVELQDPVTRTQLRAMAAKTVCPPHKVELEALLEKQAYKEQVLAKRLTMLELLEKYPACEMKFSEFIALLPSIRPRYYSISSSPRVDEKQASITVSVVSGEAWSGYGEYKGIASNYLAELQEGDTITCFISTPQSEFTLPKDPETPLIMVGPGTGVAPFRGFVQARKQLKEQGQSLGEAHLYFGCRSPHEDYLYQEELENAQSEGIITLHTAFSRMPNQPKTYVQHVMEQDGKKLIELLDQGAHFYICGDGSQMAPAVEATLMKSYADVHQVSEADARLWLQQLEEKGRYAKDVWAG

SEQ ID NO: 22 - protein, 1048 aa, Artificial Sequence
  BM3 variant (V78M, A82P, F87A, M177Y, A184Y)
AIKEMPQPKTFGELKNLPLLNTDKPVQALMKIADELGEIFKFEAPGRVTRYLSSQRLIKEACDESRFDKNLSQALKFMRDFPGDGLATSWTHEKNWKKAHNILLPSFSQQAMKGYHAMMVDIAVQLVQKWERLNADEHIEVPEDMTRLTLDTIGLCGFNYRFNSFYRDQPHPFITSYVRALDEYMNKLQRANPDDPAYDENKRQFQEDIKVMNDLVDKIIADRKASGEQSDDLLTHMLNGKDPETGEPLDDENIRYQIITFLIAGHETTSGLLSFALYFLVKNPHVLQKAAEEAARVLVDPVPSYKQVKQLKYVGMVLNEALRLWPTAPAFSLYAKEDTVLGGEYPLEKGDELMVLIPQLHRDKTIWGDDVEEFRPERFENPSAIPQHAFKPFGNGQRACIGQQFALHEATLVLGMMLKHFDFEDHTNYELDIKETLTLKPEGFVVKAKSKKIPLGGIPSPSTEQSAKKVRKKAENAHNTPLLVLYGSNMGTAEGTARDLADIAMSKGFAPQVATLDSHAGNLPREGAVLIVTASYNGHPPDNAKQFVDWLDQASADEVKGVRYSVFGCGDKNWATTYQKVPAFIDETLAAKGAENIADRGEADASDDFEGTYEEWREHMWSDVAAYFNLDIENSEDNKSTLSLQFVDSAADMPLAKMHGAFSTNVVASKELQQPGSARSTRHLEIELPKEASYQEGDHLGVIPRNYEGIVNRVTARFGLDASQQIRLEAEEEKLAHLPLAKTVSVEELLQYVELQDPVTRTQLRAMAAKTVCPPHKVELEALLEKQAYKEQVLAKRLTMLELLEKYPACEMKFSEFIALLPSIRPRYYSISSSPRVDEKQASITVSVVSGEAWSGYGEYKGIASNYLAELQEGDTITCFISTPQSEFTLPKDPETPLIMVGPGTGVAPFRGFVQARKQLKEQGQSLGEAHLYFGCRSPHEDYLYQEELENAQSEGIITLHTAFSRMPNQPKTYVQHVMEQDGKKLIELLDQGAHFYICGDGSQMAPAVEATLMKSYADVHQVSEADARLWLQQLEEKGRYAKDVWAG

SEQ ID NO: 23 - protein, 1048 aa, Artificial Sequence
  BM3 variant (V78Y, A82P, F87A, M177Y, A184Y)
AIKEMPQPKTFGELKNLPLLNTDKPVQALMKIADELGEIFKFEAPGRVTRYLSSQRLIKEACDESRFDKNLSQALKFYRDFPGDGLATSWTHEKNWKKAHNILLPSFSQQAMKGYHAMMVDIAVQLVQKWERLNADEHIEVPEDMTRLTLDTIGLCGFNYRFNSFYRDQPHPFITSYVRALDEYMNKLQRANPDDPAYDENKRQFQEDIKVMNDLVDKIIADRKASGEQSDDLLTHMLNGKDPETGEPLDDENIRYQIITFLIAGHETTSGLLSFALYFLVKNPHVLQKAAEEAARVLVDPVPSYKQVKQLKYVGMVLNEALRLWPTAPAFSLYAKEDTVLGGEYPLEKGDELMVLIPQLHRDKTIWGDDVEEFRPERFENPSAIPQHAFKPFGNGQRACIGQQFALHEATLVLGMMLKHFDFEDHTNYELDIKETLTLKPEGFVVKAKSKKIPLGGIPSPSTEQSAKKVRKKAENAHNTPLLVLYGSNMGTAEGTARDLADIAMSKGFAPQVATLDSHAGNLPREGAVLIVTASYNGHPPDNAKQFVDWLDQASADEVKGVRYSVFGCGDKNWATTYQKVPAFIDETLAAKGAENIADRGEADASDDFEGTYEEWREHMWSDVAAYFNLDIENSEDNKSTLSLQFVDSAADMPLAKMHGAFSTNVVASKELQQPGSARSTRHLEIELPKEASYQEGDHLGVIPRNYEGIVNRVTARFGLDASQQIRLEAEEEKLAHLPLAKTVSVEELLQYVELQDPVTRTQLRAMAAKTVCPPHKVELEALLEKQAYKEQVLAKRLTMLELLEKYPACEMKFSEFIALLPSIRPRYYSISSSPRVDEKQASITVSVVSGEAWSGYGEYKGIASNYLAELQEGDTITCFISTPQSEFTLPKDPETPLIMVGPGTGVAPFRGFVQARKQLKEQGQSLGEAHLYFGCRSPHEDYLYQEELENAQSEGIITLHTAFSRMPNQPKTYVQHVMEQDGKKLIELLDQGAHFYICGDGSQMAPAVEATLMKSYADVHQVSEADARLWLQQLEEKGRYAKDVWAG

SEQ ID NO: 24 - protein, 1048 aa, Artificial Sequence
  BM3 variant (V78F, A82Q, F87A, M177Y, A184Y)
AIKEMPQPKTFGELKNLPLLNTDKPVQALMKIADELGEIFKFEAPGRVTRYLSSQRLIKEACDESRFDKNLSQALKFFRDFQGDGLATSWTHEKNWKKAHNILLPSFSQQAMKGYHAMMVDIAVQLVQKWERLNADEHIEVPEDMTRLTLDTIGLCGFNYRFNSFYRDQPHPFITSYVRALDEYMNKLQRANPDDPAYDENKRQFQEDIKVMNDLVDKIIADRKASGEQSDDLLTHMLNGKDPETGEPLDDENIRYQIITFLIAGHETTSGLLSFALYFLVKNPHVLQKAAEEAARVLVDPVPSYKQVKQLKYVGMVLNEALRLWPTAPAFSLYAKEDTVLGGEYPLEKGDELMVLIPQLHRDKTIWGDDVEEFRPERFENPSAIPQHAFKPFGNGQRACIGQQFALHEATLVLGMMLKHFDFEDHTNYELDIKETLTLKPEGFVVKAKSKKIPLGGIPSPSTEQSAKKVRKKAENAHNTPLLVLYGSNMGTAEGTARDLADIAMSKGFAPQVATLDSHAGNLPREGAVLIVTASYNGHPPDNAKQFVDWLDQASADEVKGVRYSVFGCGDKNWATTYQKVPAFIDETLAAKGAENIADRGEADASDDFEGTYEEWREHMWSDVAAYFNLDIENSEDNKSTLSLQFVDSAADMPLAKMHGAFSTNVVASKELQQPGSARSTRHLEIELPKEASYQEGDHLGVIPRNYEGIVNRVTARFGLDASQQIRLEAEEEKLAHLPLAKTVSVEELLQYVELQDPVTRTQLRAMAAKTVCPPHKVELEALLEKQAYKEQVLAKRLTMLELLEKYPACEMKFSEFIALLPSIRPRYYSISSSPRVDEKQASITVSVVSGEAWSGYGEYKGIASNYLAELQEGDTITCFISTPQSEFTLPKDPETPLIMVGPGTGVAPFRGFVQARKQLKEQGQSLGEAHLYFGCRSPHEDYLYQEELENAQSEGIITLHTAFSRMPNQPKTYVQHVMEQDGKKLIELLDQGAHFYICGDGSQMAPAVEATLMKSYADVHQVSEADARLWLQQLEEKGRYAKDVWAG

SEQ ID NO: 25 - protein, 1048 aa, Artificial Sequence
  BM3 variant (V78L, A82Q, F87A, M177Y, A184Y)
AIKEMPQPKTFGELKNLPLLNTDKPVQALMKIADELGEIFKFEAPGRVTRYLSSQRLIKEACDESRFDKNLSQALKFLRDFQGDGLATSWTHEKNWKKAHNILLPSFSQQAMKGYHAMMVDIAVQLVQKWERLNADEHIEVPEDMTRLTLDTIGLCGFNYRFNSFYRDQPHPFITSYVRALDEYMNKLQRANPDDPAYDENKRQFQEDIKVMNDLVDKIIADRKASGEQSDDLLTHMLNGKDPETGEPLDDENIRYQIITFLIAGHETTSGLLSFALYFLVKNPHVLQKAAEEAARVLVDPVPSYKQVKQLKYVGMVLNEALRLWPTAPAFSLYAKEDTVLGGEYPLEKGDELMVLIPQLHRDKTIWGDDVEEFRPERFENPSAIPQHAFKPFGNGQRACIGQQFALHEATLVLGMMLKHFDFEDHTNYELDIKETLTLKPEGFVVKAKSKKIPLGGIPSPSTEQSAKKVRKKAENAHNTPLLVLYGSNMGTAEGTARDLADIAMSKGFAPQVATLDSHAGNLPREGAVLIVTASYNGHPPDNAKQFVDWLDQASADEVKGVRYSVFGCGDKNWATTYQKVPAFIDETLAAKGAENIADRGEADASDDFEGTYEEWREHMWSDVAAYFNLDIENSEDNKSTLSLQFVDSAADMPLAKMHGAFSTNVVASKELQQPGSARSTRHLEIELPKEASYQEGDHLGVIPRNYEGIVNRVTARFGLDASQQIRLEAEEEKLAHLPLAKTVSVEELLQYVELQDPVTRTQLRAMAAKTVCPPHKVELEALLEKQAYKEQVLAKRLTMLELLEKYPACEMKFSEFIALLPSIRPRYYSISSSPRVDEKQASITVSVVSGEAWSGYGEYKGIASNYLAELQEGDTITCFISTPQSEFTLPKDPETPLIMVGPGTGVAPFRGFVQARKQLKEQGQSLGEAHLYFGCRSPHEDYLYQEELENAQSEGIITLHTAFSRMPNQPKTYVQHVMEQDGKKLIELLDQGAHFYICGDGSQMAPAVEATLMKSYADVHQVSEADARLWLQQLEEKGRYAKDVWAG

SEQ ID NO: 26 - protein, 1048 aa, Artificial Sequence
  BM3 variant (V78I, A82Q, F87A, M177Y, A184Y)
AIKEMPQPKTFGELKNLPLLNTDKPVQALMKIADELGEIFKFEAPGRVTRYLSSQRLIKEACDESRFDKNLSQALKFIRDFQGDGLATSWTHEKNWKKAHNILLPSFSQQAMKGYHAMMVDIAVQLVQKWERLNADEHIEVPEDMTRLTLDTIGLCGFNYRFNSFYRDQPHPFITSYVRALDEYMNKLQRANPDDPAYDENKRQFQEDIKVMNDLVDKIIADRKASGEQSDDLLTHMLNGKDPETGEPLDDENIRYQIITFLIAGHETTSGLLSFALYFLVKNPHVLQKAAEEAARVLVDPVPSYKQVKQLKYVGMVLNEALRLWPTAPAFSLYAKEDTVLGGEYPLEKGDELMVLIPQLHRDKTIWGDDVEEFRPERFENPSAIPQHAFKPFGNGQRACIGQQFALHEATLVLGMMLKHFDFEDHTNYELDIKETLTLKPEGFVVKAKSKKIPLGGIPSPSTEQSAKKVRKKAENAHNTPLLVLYGSNMGTAEGTARDLADIAMSKGFAPQVATLDSHAGNLPREGAVLIVTASYNGHPPDNAKQFVDWLDQASADEVKGVRYSVFGCGDKNWATTYQKVPAFIDETLAAKGAENIADRGEADASDDFEGTYEEWREHMWSDVAAYFNLDIENSEDNKSTLSLQFVDSAADMPLAKMHGAFSTNVVASKELQQPGSARSTRHLEIELPKEASYQEGDHLGVIPRNYEGIVNRVTARFGLDASQQIRLEAEEEKLAHLPLAKTVSVEELLQYVELQDPVTRTQLRAMAAKTVCPPHKVELEALLEKQAYKEQVLAKRLTMLELLEKYPACEMKFSEFIALLPSIRPRYYSISSSPRVDEKQASITVSVVSGEAWSGYGEYKGIASNYLAELQEGDTITCFISTPQSEFTLPKDPETPLIMVGPGTGVAPFRGFVQARKQLKEQGQSLGEAHLYFGCRSPHEDYLYQEELENAQSEGIITLHTAFSRMPNQPKTYVQHVMEQDGKKLIELLDQGAHFYICGDGSQMAPAVEATLMKSYADVHQVSEADARLWLQQLEEKGRYAKDVWAG

SEQ ID NO: 27 - protein, 1048 aa, Artificial Sequence
  BM3 variant (V78M, A82Q, F87A, M177Y, A184Y)
AIKEMPQPKTFGELKNLPLLNTDKPVQALMKIADELGEIFKFEAPGRVTRYLSSQRLIKEACDESRFDKNLSQALKFMRDFQGDGLATSWTHEKNWKKAHNILLPSFSQQAMKGYHAMMVDIAVQLVQKWERLNADEHIEVPEDMTRLTLDTIGLCGFNYRFNSFYRDQPHPFITSYVRALDEYMNKLQRANPDDPAYDENKRQFQEDIKVMNDLVDKIIADRKASGEQSDDLLTHMLNGKDPETGEPLDDENIRYQIITFLIAGHETTSGLLSFALYFLVKNPHVLQKAAEEAARVLVDPVPSYKQVKQLKYVGMVLNEALRLWPTAPAFSLYAKEDTVLGGEYPLEKGDELMVLIPQLHRDKTIWGDDVEEFRPERFENPSAIPQHAFKPFGNGQRACIGQQFALHEATLVLGMMLKHFDFEDHTNYELDIKETLTLKPEGFVVKAKSKKIPLGGIPSPSTEQSAKKVRKKAENAHNTPLLVLYGSNMGTAEGTARDLADIAMSKGFAPQVATLDSHAGNLPREGAVLIVTASYNGHPPDNAKQFVDWLDQASADEVKGVRYSVFGCGDKNWATTYQKVPAFIDETLAAKGAENIADRGEADASDDFEGTYEEWREHMWSDVAAYFNLDIENSEDNKSTLSLQFVDSAADMPLAKMHGAFSTNVVASKELQQPGSARSTRHLEIELPKEASYQEGDHLGVIPRNYEGIVNRVTARFGLDASQQIRLEAEEEKLAHLPLAKTVSVEELLQYVELQDPVTRTQLRAMAAKTVCPPHKVELEALLEKQAYKEQVLAKRLTMLELLEKYPACEMKFSEFIALLPSIRPRYYSISSSPRVDEKQASITVSVVSGEAWSGYGEYKGIASNYLAELQEGDTITCFISTPQSEFTLPKDPETPLIMVGPGTGVAPFRGFVQARKQLKEQGQSLGEAHLYFGCRSPHEDYLYQEELENAQSEGIITLHTAFSRMPNQPKTYVQHVMEQDGKKLIELLDQGAHFYICGDGSQMAPAVEATLMKSYADVHQVSEADARLWLQQLEEKGRYAKDVWAG

SEQ ID NO: 28 - protein, 1048 aa, Artificial Sequence
  BM3 variant (V78Y, A82Q, F87A, M177Y, A184Y)
AIKEMPQPKTFGELKNLPLLNTDKPVQALMKIADELGEIFKFEAPGRVTRYLSSQRLIKEACDESRFDKNLSQALKFYRDFQGDGLATSWTHEKNWKKAHNILLPSFSQQAMKGYHAMMVDIAVQLVQKWERLNADEHIEVPEDMTRLTLDTIGLCGFNYRFNSFYRDQPHPFITSYVRALDEYMNKLQRANPDDPAYDENKRQFQEDIKVMNDLVDKIIADRKASGEQSDDLLTHMLNGKDPETGEPLDDENIRYQIITFLIAGHETTSGLLSFALYFLVKNPHVLQKAAEEAARVLVDPVPSYKQVKQLKYVGMVLNEALRLWPTAPAFSLYAKEDTVLGGEYPLEKGDELMVLIPQLHRDKTIWGDDVEEFRPERFENPSAIPQHAFKPFGNGQRACIGQQFALHEATLVLGMMLKHFDFEDHTNYELDIKETLTLKPEGFVVKAKSKKIPLGGIPSPSTEQSAKKVRKKAENAHNTPLLVLYGSNMGTAEGTARDLADIAMSKGFAPQVATLDSHAGNLPREGAVLIVTASYNGHPPDNAKQFVDWLDQASADEVKGVRYSVFGCGDKNWATTYQKVPAFIDETLAAKGAENIADRGEADASDDFEGTYEEWREHMWSDVAAYFNLDIENSEDNKSTLSLQFVDSAADMPLAKMHGAFSTNVVASKELQQPGSARSTRHLEIELPKEASYQEGDHLGVIPRNYEGIVNRVTARFGLDASQQIRLEAEEEKLAHLPLAKTVSVEELLQYVELQDPVTRTQLRAMAAKTVCPPHKVELEALLEKQAYKEQVLAKRLTMLELLEKYPACEMKFSEFIALLPSIRPRYYSISSSPRVDEKQASITVSVVSGEAWSGYGEYKGIASNYLAELQEGDTITCFISTPQSEFTLPKDPETPLIMVGPGTGVAPFRGFVQARKQLKEQGQSLGEAHLYFGCRSPHEDYLYQEELENAQSEGIITLHTAFSRMPNQPKTYVQHVMEQDGKKLIELLDQGAHFYICGDGSQMAPAVEATLMKSYADVHQVSEADARLWLQQLEEKGRYAKDVWAG

SEQ ID NO: 29 - protein, 1048 aa, Artificial Sequence
  BM3 variant (V78F, A82E, F87A, M177Y)
AIKEMPQPKTFGELKNLPLLNTDKPVQALMKIADELGEIFKFEAPGRVTRYLSSQRLIKEACDESRFDKNLSQALKFFRDFEGDGLATSWTHEKNWKKAHNILLPSFSQQAMKGYHAMMVDIAVQLVQKWERLNADEHIEVPEDMTRLTLDTIGLCGFNYRFNSFYRDQPHPFITSYVRALDEAMNKLQRANPDDPAYDENKRQFQEDIKVMNDLVDKIIADRKASGEQSDDLLTHMLNGKDPETGEPLDDENIRYQIITFLIAGHETTSGLLSFALYFLVKNPHVLQKAAEEAARVLVDPVPSYKQVKQLKYVGMVLNEALRLWPTAPAFSLYAKEDTVLGGEYPLEKGDELMVLIPQLHRDKTIWGDDVEEFRPERFENPSAIPQHAFKPFGNGQRACIGQQFALHEATLVLGMMLKHFDFEDHTNYELDIKETLTLKPEGFVVKAKSKKIPLGGIPSPSTEQSAKKVRKKAENAHNTPLLVLYGSNMGTAEGTARDLADIAMSKGFAPQVATLDSHAGNLPREGAVLIVTASYNGHPPDNAKQFVDWLDQASADEVKGVRYSVFGCGDKNWATTYQKVPAFIDETLAAKGAENIADRGEADASDDFEGTYEEWREHMWSDVAAYFNLDIENSEDNKSTLSLQFVDSAADMPLAKMHGAFSTNVVASKELQQPGSARSTRHLEIELPKEASYQEGDHLGVIPRNYEGIVNRVTARFGLDASQQIRLEAEEEKLAHLPLAKTVSVEELLQYVELQDPVTRTQLRAMAAKTVCPPHKVELEALLEKQAYKEQVLAKRLTMLELLEKYPACEMKFSEFIALLPSIRPRYYSISSSPRVDEKQASITVSVVSGEAWSGYGEYKGIASNYLAELQEGDTITCFISTPQSEFTLPKDPETPLIMVGPGTGVAPFRGFVQARKQLKEQGQSLGEAHLYFGCRSPHEDYLYQEELENAQSEGIITLHTAFSRMPNQPKTYVQHVMEQDGKKLIELLDQGAHFYICGDGSQMAPAVEATLMKSYADVHQVSEADARLWLQQLEEKGRYAKDVWAG

SEQ ID NO: 30 - protein, 1048 aa, Artificial Sequence
  BM3 variant (V78L, A82E, F87A, M177Y)
AIKEMPQPKTFGELKNLPLLNTDKPVQALMKIADELGEIFKFEAPGRVTRYLSSQRLIKEACDESRFDKNLSQALKFLRDFEGDGLATSWTHEKNWKKAHNILLPSFSQQAMKGYHAMMVDIAVQLVQKWERLNADEHIEVPEDMTRLTLDTIGLCGFNYRFNSFYRDQPHPFITSYVRALDEAMNKLQRANPDDPAYDENKRQFQEDIKVMNDLVDKIIADRKASGEQSDDLLTHMLNGKDPETGEPLDDENIRYQIITFLIAGHETTSGLLSFALYFLVKNPHVLQKAAEEAARVLVDPVPSYKQVKQLKYVGMVLNEALRLWPTAPAFSLYAKEDTVLGGEYPLEKGDELMVLIPQLHRDKTIWGDDVEEFRPERFENPSAIPQHAFKPFGNGQRACIGQQFALHEATLVLGMMLKHFDFEDHTNYELDIKETLTLKPEGFVVKAKSKKIPLGGIPSPSTEQSAKKVRKKAENAHNTPLLVLYGSNMGTAEGTARDLADIAMSKGFAPQVATLDSHAGNLPREGAVLIVTASYNGHPPDNAKQFVDWLDQASADEVKGVRYSVFGCGDKNWATTYQKVPAFIDETLAAKGAENIADRGEADASDDFEGTYEEWREHMWSDVAAYFNLDIENSEDNKSTLSLQFVDSAADMPLAKMHGAFSTNVVASKELQQPGSARSTRHLEIELPKEASYQEGDHLGVIPRNYEGIVNRVTARFGLDASQQIRLEAEEEKLAHLPLAKTVSVEELLQYVELQDPVTRTQLRAMAAKTVCPPHKVELEALLEKQAYKEQVLAKRLTMLELLEKYPACEMKFSEFIALLPSIRPRYYSISSSPRVDEKQASITVSVVSGEAWSGYGEYKGIASNYLAELQEGDTITCFISTPQSEFTLPKDPETPLIMVGPGTGVAPFRGFVQARKQLKEQGQSLGEAHLYFGCRSPHEDYLYQEELENAQSEGIITLHTAFSRMPNQPKTYVQHVMEQDGKKLIELLDQGAHFYICGDGSQMAPAVEATLMKSYADVHQVSEADARLWLQQLEEKGRYAKDVWAG

SEQ ID NO: 31 - protein, 1048 aa, Artificial Sequence
  BM3 variant (V78I, A82E, F87A, M177Y)
AIKEMPQPKTFGELKNLPLLNTDKPVQALMKIADELGEIFKFEAPGRVTRYLSSQRLIKEACDESRFDKNLSQALKFIRDFEGDGLATSWTHEKNWKKAHNILLPSFSQQAMKGYHAMMVDIAVQLVQKWERLNADEHIEVPEDMTRLTLDTIGLCGFNYRFNSFYRDQPHPFITSYVRALDEAMNKLQRANPDDPAYDENKRQFQEDIKVMNDLVDKIIADRKASGEQSDDLLTHMLNGKDPETGEPLDDENIRYQIITFLIAGHETTSGLLSFALYFLVKNPHVLQKAAEEAARVLVDPVPSYKQVKQLKYVGMVLNEALRLWPTAPAFSLYAKEDTVLGGEYPLEKGDELMVLIPQLHRDKTIWGDDVEEFRPERFENPSAIPQHAFKPFGNGQRACIGQQFALHEATLVLGMMLKHFDFEDHTNYELDIKETLTLKPEGFVVKAKSKKIPLGGIPSPSTEQSAKKVRKKAENAHNTPLLVLYGSNMGTAEGTARDLADIAMSKGFAPQVATLDSHAGNLPREGAVLIVTASYNGHPPDNAKQFVDWLDQASADEVKGVRYSVFGCGDKNWATTYQKVPAFIDETLAAKGAENIADRGEADASDDFEGTYEEWREHMWSDVAAYFNLDIENSEDNKSTLSLQFVDSAADMPLAKMHGAFSTNVVASKELQQPGSARSTRHLEIELPKEASYQEGDHLGVIPRNYEGIVNRVTARFGLDASQQIRLEAEEEKLAHLPLAKTVSVEELLQYVELQDPVTRTQLRAMAAKTVCPPHKVELEALLEKQAYKEQVLAKRLTMLELLEKYPACEMKFSEFIALLPSIRPRYYSISSSPRVDEKQASITVSVVSGEAWSGYGEYKGIASNYLAELQEGDTITCFISTPQSEFTLPKDPETPLIMVGPGTGVAPFRGFVQARKQLKEQGQSLGEAHLYFGCRSPHEDYLYQEELENAQSEGIITLHTAFSRMPNQPKTYVQHVMEQDGKKLIELLDQGAHFYICGDGSQMAPAVEATLMKSYADVHQVSEADARLWLQQLEEKGRYAKDVWAG

SEQ ID NO: 32 - protein, 1048 aa, Artificial Sequence
  BM3 variant (V78M, A82E, F87A, M177Y)
AIKEMPQPKTFGELKNLPLLNTDKPVQALMKIADELGEIFKFEAPGRVTRYLSSQRLIKEACDESRFDKNLSQALKFMRDFEGDGLATSWTHEKNWKKAHNILLPSFSQQAMKGYHAMMVDIAVQLVQKWERLNADEHIEVPEDMTRLTLDTIGLCGFNYRFNSFYRDQPHPFITSYVRALDEAMNKLQRANPDDPAYDENKRQFQEDIKVMNDLVDKIIADRKASGEQSDDLLTHMLNGKDPETGEPLDDENIRYQIITFLIAGHETTSGLLSFALYFLVKNPHVLQKAAEEAARVLVDPVPSYKQVKQLKYVGMVLNEALRLWPTAPAFSLYAKEDTVLGGEYPLEKGDELMVLIPQLHRDKTIWGDDVEEFRPERFENPSAIPQHAFKPFGNGQRACIGQQFALHEATLVLGMMLKHFDFEDHTNYELDIKETLTLKPEGFVVKAKSKKIPLGGIPSPSTEQSAKKVRKKAENAHNTPLLVLYGSNMGTAEGTARDLADIAMSKGFAPQVATLDSHAGNLPREGAVLIVTASYNGHPPDNAKQFVDWLDQASADEVKGVRYSVFGCGDKNWATTYQKVPAFIDETLAAKGAENIADRGEADASDDFEGTYEEWREHMWSDVAAYFNLDIENSEDNKSTLSLQFVDSAADMPLAKMHGAFSTNVVASKELQQPGSARSTRHLEIELPKEASYQEGDHLGVIPRNYEGIVNRVTARFGLDASQQIRLEAEEEKLAHLPLAKTVSVEELLQYVELQDPVTRTQLRAMAAKTVCPPHKVELEALLEKQAYKEQVLAKRLTMLELLEKYPACEMKFSEFIALLPSIRPRYYSISSSPRVDEKQASITVSVVSGEAWSGYGEYKGIASNYLAELQEGDTITCFISTPQSEFTLPKDPETPLIMVGPGTGVAPFRGFVQARKQLKEQGQSLGEAHLYFGCRSPHEDYLYQEELENAQSEGIITLHTAFSRMPNQPKTYVQHVMEQDGKKLIELLDQGAHFYICGDGSQMAPAVEATLMKSYADVHQVSEADARLWLQQLEEKGRYAKDVWAG

SEQ ID NO: 33 - protein, 1048 aa, Artificial Sequence
  BM3 variant (V78Y, A82E, F87A, M177Y)
AIKEMPQPKTFGELKNLPLLNTDKPVQALMKIADELGEIFKFEAPGRVTRYLSSQRLIKEACDESRFDKNLSQALKFYRDFEGDGLATSWTHEKNWKKAHNILLPSFSQQAMKGYHAMMVDIAVQLVQKWERLNADEHIEVPEDMTRLTLDTIGLCGFNYRFNSFYRDQPHPFITSYVRALDEAMNKLQRANPDDPAYDENKRQFQEDIKVMNDLVDKIIADRKASGEQSDDLLTHMLNGKDPETGEPLDDENIRYQIITFLIAGHETTSGLLSFALYFLVKNPHVLQKAAEEAARVLVDPVPSYKQVKQLKYVGMVLNEALRLWPTAPAFSLYAKEDTVLGGEYPLEKGDELMVLIPQLHRDKTIWGDDVEEFRPERFENPSAIPQHAFKPFGNGQRACIGQQFALHEATLVLGMMLKHFDFEDHTNYELDIKETLTLKPEGFVVKAKSKKIPLGGIPSPSTEQSAKKVRKKAENAHNTPLLVLYGSNMGTAEGTARDLADIAMSKGFAPQVATLDSHAGNLPREGAVLIVTASYNGHPPDNAKQFVDWLDQASADEVKGVRYSVFGCGDKNWATTYQKVPAFIDETLAAKGAENIADRGEADASDDFEGTYEEWREHMWSDVAAYFNLDIENSEDNKSTLSLQFVDSAADMPLAKMHGAFSTNVVASKELQQPGSARSTRHLEIELPKEASYQEGDHLGVIPRNYEGIVNRVTARFGLDASQQIRLEAEEEKLAHLPLAKTVSVEELLQYVELQDPVTRTQLRAMAAKTVCPPHKVELEALLEKQAYKEQVLAKRLTMLELLEKYPACEMKFSEFIALLPSIRPRYYSISSSPRVDEKQASITVSVVSGEAWSGYGEYKGIASNYLAELQEGDTITCFISTPQSEFTLPKDPETPLIMVGPGTGVAPFRGFVQARKQLKEQGQSLGEAHLYFGCRSPHEDYLYQEELENAQSEGIITLHTAFSRMPNQPKTYVQHVMEQDGKKLIELLDQGAHFYICGDGSQMAPAVEATLMKSYADVHQVSEADARLWLQQLEEKGRYAKDVWAG

SEQ ID NO: 34 - protein, 1048 aa, Artificial Sequence
  BM3 variant (V78F, A82P, F87A, M177Y)
AIKEMPQPKTFGELKNLPLLNTDKPVQALMKIADELGEIFKFEAPGRVTRYLSSQRLIKEACDESRFDKNLSQALKFFRDFPGDGLATSWTHEKNWKKAHNILLPSFSQQAMKGYHAMMVDIAVQLVQKWERLNADEHIEVPEDMTRLTLDTIGLCGFNYRFNSFYRDQPHPFITSYVRALDEAMNKLQRANPDDPAYDENKRQFQEDIKVMNDLVDKIIADRKASGEQSDDLLTHMLNGKDPETGEPLDDENIRYQIITFLIAGHETTSGLLSFALYFLVKNPHVLQKAAEEAARVLVDPVPSYKQVKQLKYVGMVLNEALRLWPTAPAFSLYAKEDTVLGGEYPLEKGDELMVLIPQLHRDKTIWGDDVEEFRPERFENPSAIPQHAFKPFGNGQRACIGQQFALHEATLVLGMMLKHFDFEDHTNYELDIKETLTLKPEGFVVKAKSKKIPLGGIPSPSTEQSAKKVRKKAENAHNTPLLVLYGSNMGTAEGTARDLADIAMSKGFAPQVATLDSHAGNLPREGAVLIVTASYNGHPPDNAKQFVDWLDQASADEVKGVRYSVFGCGDKNWATTYQKVPAFIDETLAAKGAENIADRGEADASDDFEGTYEEWREHMWSDVAAYFNLDIENSEDNKSTLSLQFVDSAADMPLAKMHGAFSTNVVASKELQQPGSARSTRHLEIELPKEASYQEGDHLGVIPRNYEGIVNRVTARFGLDASQQIRLEAEEEKLAHLPLAKTVSVEELLQYVELQDPVTRTQLRAMAAKTVCPPHKVELEALLEKQAYKEQVLAKRLTMLELLEKYPACEMKFSEFIALLPSIRPRYYSISSSPRVDEKQASITVSVVSGEAWSGYGEYKGIASNYLAELQEGDTITCFISTPQSEFTLPKDPETPLIMVGPGTGVAPFRGFVQARKQLKEQGQSLGEAHLYFGCRSPHEDYLYQEELENAQSEGIITLHTAFSRMPNQPKTYVQHVMEQDGKKLIELLDQGAHFYICGDGSQMAPAVEATLMKSYADVHQVSEADARLWLQQLEEKGRYAKDVWAG

SEQ ID NO: 35 - protein, 1048 aa, Artificial Sequence
  BM3 variant (V78L, A82P, F87A, M177Y)
AIKEMPQPKTFGELKNLPLLNTDKPVQALMKIADELGEIFKFEAPGRVTRYLSSQRLIKEACDESRFDKNLSQALKFLRDFPGDGLATSWTHEKNWKKAHNILLPSFSQQAMKGYHAMMVDIAVQLVQKWERLNADEHIEVPEDMTRLTLDTIGLCGFNYRFNSFYRDQPHPFITSYVRALDEAMNKLQRANPDDPAYDENKRQFQEDIKVMNDLVDKIIADRKASGEQSDDLLTHMLNGKDPETGEPLDDENIRYQIITFLIAGHETTSGLLSFALYFLVKNPHVLQKAAEEAARVLVDPVPSYKQVKQLKYVGMVLNEALRLWPTAPAFSLYAKEDTVLGGEYPLEKGDELMVLIPQLHRDKTIWGDDVEEFRPERFENPSAIPQHAFKPFGNGQRACIGQQFALHEATLVLGMMLKHFDFEDHTNYELDIKETLTLKPEGFVVKAKSKKIPLGGIPSPSTEQSAKKVRKKAENAHNTPLLVLYGSNMGTAEGTARDLADIAMSKGFAPQVATLDSHAGNLPREGAVLIVTASYNGHPPDNAKQFVDWLDQASADEVKGVRYSVFGCGDKNWATTYQKVPAFIDETLAAKGAENIADRGEADASDDFEGTYEEWREHMWSDVAAYFNLDIENSEDNKSTLSLQFVDSAADMPLAKMHGAFSTNVVASKELQQPGSARSTRHLEIELPKEASYQEGDHLGVIPRNYEGIVNRVTARFGLDASQQIRLEAEEEKLAHLPLAKTVSVEELLQYVELQDPVTRTQLRAMAAKTVCPPHKVELEALLEKQAYKEQVLAKRLTMLELLEKYPACEMKFSEFIALLPSIRPRYYSISSSPRVDEKQASITVSVVSGEAWSGYGEYKGIASNYLAELQEGDTITCFISTPQSEFTLPKDPETPLIMVGPGTGVAPFRGFVQARKQLKEQGQSLGEAHLYFGCRSPHEDYLYQEELENAQSEGIITLHTAFSRMPNQPKTYVQHVMEQDGKKLIELLDQGAHFYICGDGSQMAPAVEATLMKSYADVHQVSEADARLWLQQLEEKGRYAKDVWAG

SEQ ID NO: 36 - protein, 1048 aa, Artificial Sequence
  BM3 variant (V78I, A82P, F87A, M177Y)
AIKEMPQPKTFGELKNLPLLNTDKPVQALMKIADELGEIFKFEAPGRVTRYLSSQRLIKEACDESRFDKNLSQALKFIRDFPGDGLATSWTHEKNWKKAHNILLPSFSQQAMKGYHAMMVDIAVQLVQKWERLNADEHIEVPEDMTRLTLDTIGLCGFNYRFNSFYRDQPHPFITSYVRALDEAMNKLQRANPDDPAYDENKRQFQEDIKVMNDLVDKIIADRKASGEQSDDLLTHMLNGKDPETGEPLDDENIRYQIITFLIAGHETTSGLLSFALYFLVKNPHVLQKAAEEAARVLVDPVPSYKQVKQLKYVGMVLNEALRLWPTAPAFSLYAKEDTVLGGEYPLEKGDELMVLIPQLHRDKTIWGDDVEEFRPERFENPSAIPQHAFKPFGNGQRACIGQQFALHEATLVLGMMLKHFDFEDHTNYELDIKETLTLKPEGFVVKAKSKKIPLGGIPSPSTEQSAKKVRKKAENAHNTPLLVLYGSNMGTAEGTARDLADIAMSKGFAPQVATLDSHAGNLPREGAVLIVTASYNGHPPDNAKQFVDWLDQASADEVKGVRYSVFGCGDKNWATTYQKVPAFIDETLAAKGAENIADRGEADASDDFEGTYEEWREHMWSDVAAYFNLDIENSEDNKSTLSLQFVDSAADMPLAKMHGAFSTNVVASKELQQPGSARSTRHLEIELPKEASYQEGDHLGVIPRNYEGIVNRVTARFGLDASQQIRLEAEEEKLAHLPLAKTVSVEELLQYVELQDPVTRTQLRAMAAKTVCPPHKVELEALLEKQAYKEQVLAKRLTMLELLEKYPACEMKFSEFIALLPSIRPRYYSISSSPRVDEKQASITVSVVSGEAWSGYGEYKGIASNYLAELQEGDTITCFISTPQSEFTLPKDPETPLIMVGPGTGVAPFRGFVQARKQLKEQGQSLGEAHLYFGCRSPHEDYLYQEELENAQSEGIITLHTAFSRMPNQPKTYVQHVMEQDGKKLIELLDQGAHFYICGDGSQMAPAVEATLMKSYADVHQVSEADARLWLQQLEEKGRYAKDVWAG

SEQ ID NO: 37 - protein, 1048 aa, Artificial Sequence
  BM3 variant (V78M, A82P, F87A, M177Y)
AIKEMPQPKTFGELKNLPLLNTDKPVQALMKIADELGEIFKFEAPGRVTRYLSSQRLIKEACDESRFDKNLSQALKFMRDFPGDGLATSWTHEKNWKKAHNILLPSFSQQAMKGYHAMMVDIAVQLVQKWERLNADEHIEVPEDMTRLTLDTIGLCGFNYRFNSFYRDQPHPFITSYVRALDEAMNKLQRANPDDPAYDENKRQFQEDIKVMNDLVDKIIADRKASGEQSDDLLTHMLNGKDPETGEPLDDENIRYQIITFLIAGHETTSGLLSFALYFLVKNPHVLQKAAEEAARVLVDPVPSYKQVKQLKYVGMVLNEALRLWPTAPAFSLYAKEDTVLGGEYPLEKGDELMVLIPQLHRDKTIWGDDVEEFRPERFENPSAIPQHAFKPFGNGQRACIGQQFALHEATLVLGMMLKHFDFEDHTNYELDIKETLTLKPEGFVVKAKSKKIPLGGIPSPSTEQSAKKVRKKAENAHNTPLLVLYGSNMGTAEGTARDLADIAMSKGFAPQVATLDSHAGNLPREGAVLIVTASYNGHPPDNAKQFVDWLDQASADEVKGVRYSVFGCGDKNWATTYQKVPAFIDETLAAKGAENIADRGEADASDDFEGTYEEWREHMWSDVAAYFNLDIENSEDNKSTLSLQFVDSAADMPLAKMHGAFSTNVVASKELQQPGSARSTRHLEIELPKEASYQEGDHLGVIPRNYEGIVNRVTARFGLDASQQIRLEAEEEKLAHLPLAKTVSVEELLQYVELQDPVTRTQLRAMAAKTVCPPHKVELEALLEKQAYKEQVLAKRLTMLELLEKYPACEMKFSEFIALLPSIRPRYYSISSSPRVDEKQASITVSVVSGEAWSGYGEYKGIASNYLAELQEGDTITCFISTPQSEFTLPKDPETPLIMVGPGTGVAPFRGFVQARKQLKEQGQSLGEAHLYFGCRSPHEDYLYQEELENAQSEGIITLHTAFSRMPNQPKTYVQHVMEQDGKKLIELLDQGAHFYICGDGSQMAPAVEATLMKSYADVHQVSEADARLWLQQLEEKGRYAKDVWAG

SEQ ID NO: 38 - protein, 1048 aa, Artificial Sequence
  BM3 variant (V78Y, A82P, F87A, M177Y)
AIKEMPQPKTFGELKNLPLLNTDKPVQALMKIADELGEIFKFEAPGRVTRYLSSQRLIKEACDESRFDKNLSQALKFYRDFPGDGLATSWTHEKNWKKAHNILLPSFSQQAMKGYHAMMVDIAVQLVQKWERLNADEHIEVPEDMTRLTLDTIGLCGFNYRFNSFYRDQPHPFITSYVRALDEAMNKLQRANPDDPAYDENKRQFQEDIKVMNDLVDKIIADRKASGEQSDDLLTHMLNGKDPETGEPLDDENIRYQIITFLIAGHETTSGLLSFALYFLVKNPHVLQKAAEEAARVLVDPVPSYKQVKQLKYVGMVLNEALRLWPTAPAFSLYAKEDTVLGGEYPLEKGDELMVLIPQLHRDKTIWGDDVEEFRPERFENPSAIPQHAFKPFGNGQRACIGQQFALHEATLVLGMMLKHFDFEDHTNYELDIKETLTLKPEGFVVKAKSKKIPLGGIPSPSTEQSAKKVRKKAENAHNTPLLVLYGSNMGTAEGTARDLADIAMSKGFAPQVATLDSHAGNLPREGAVLIVTASYNGHPPDNAKQFVDWLDQASADEVKGVRYSVFGCGDKNWATTYQKVPAFIDETLAAKGAENIADRGEADASDDFEGTYEEWREHMWSDVAAYFNLDIENSEDNKSTLSLQFVDSAADMPLAKMHGAFSTNVVASKELQQPGSARSTRHLEIELPKEASYQEGDHLGVIPRNYEGIVNRVTARFGLDASQQIRLEAEEEKLAHLPLAKTVSVEELLQYVELQDPVTRTQLRAMAAKTVCPPHKVELEALLEKQAYKEQVLAKRLTMLELLEKYPACEMKFSEFIALLPSIRPRYYSISSSPRVDEKQASITVSVVSGEAWSGYGEYKGIASNYLAELQEGDTITCFISTPQSEFTLPKDPETPLIMVGPGTGVAPFRGFVQARKQLKEQGQSLGEAHLYFGCRSPHEDYLYQEELENAQSEGIITLHTAFSRMPNQPKTYVQHVMEQDGKKLIELLDQGAHFYICGDGSQMAPAVEATLMKSYADVHQVSEADARLWLQQLEEKGRYAKDVWAG

SEQ ID NO: 39 - protein, 1048 aa, Artificial Sequence
  BM3 variant (V78F, A82Q, F87A, M177Y)
AIKEMPQPKTFGELKNLPLLNTDKPVQALMKIADELGEIFKFEAPGRVTRYLSSQRLIKEACDESRFDKNLSQALKFFRDFQGDGLATSWTHEKNWKKAHNILLPSFSQQAMKGYHAMMVDIAVQLVQKWERLNADEHIEVPEDMTRLTLDTIGLCGFNYRFNSFYRDQPHPFITSYVRALDEAMNKLQRANPDDPAYDENKRQFQEDIKVMNDLVDKIIADRKASGEQSDDLLTHMLNGKDPETGEPLDDENIRYQIITFLIAGHETTSGLLSFALYFLVKNPHVLQKAAEEAARVLVDPVPSYKQVKQLKYVGMVLNEALRLWPTAPAFSLYAKEDTVLGGEYPLEKGDELMVLIPQLHRDKTIWGDDVEEFRPERFENPSAIPQHAFKPFGNGQRACIGQQFALHEATLVLGMMLKHFDFEDHTNYELDIKETLTLKPEGFVVKAKSKKIPLGGIPSPSTEQSAKKVRKKAENAHNTPLLVLYGSNMGTAEGTARDLADIAMSKGFAPQVATLDSHAGNLPREGAVLIVTASYNGHPPDNAKQFVDWLDQASADEVKGVRYSVFGCGDKNWATTYQKVPAFIDETLAAKGAENIADRGEADASDDFEGTYEEWREHMWSDVAAYFNLDIENSEDNKSTLSLQFVDSAADMPLAKMHGAFSTNVVASKELQQPGSARSTRHLEIELPKEASYQEGDHLGVIPRNYEGIVNRVTARFGLDASQQIRLEAEEEKLAHLPLAKTVSVEELLQYVELQDPVTRTQLRAMAAKTVCPPHKVELEALLEKQAYKEQVLAKRLTMLELLEKYPACEMKFSEFIALLPSIRPRYYSISSSPRVDEKQASITVSVVSGEAWSGYGEYKGIASNYLAELQEGDTITCFISTPQSEFTLPKDPETPLIMVGPGTGVAPFRGFVQARKQLKEQGQSLGEAHLYFGCRSPHEDYLYQEELENAQSEGIITLHTAFSRMPNQPKTYVQHVMEQDGKKLIELLDQGAHFYICGDGSQMAPAVEATLMKSYADVHQVSEADARLWLQQLEEKGRYAKDVWAG

SEQ ID NO: 40 - protein, 1048 aa, Artificial Sequence
  BM3 variant (V78L, A82Q, F87A, M177Y)
AIKEMPQPKTFGELKNLPLLNTDKPVQALMKIADELGEIFKFEAPGRVTRYLSSQRLIKEACDESRFDKNLSQALKFLRDFQGDGLATSWTHEKNWKKAHNILLPSFSQQAMKGYHAMMVDIAVQLVQKWERLNADEHIEVPEDMTRLTLDTIGLCGFNYRFNSFYRDQPHPFITSYVRALDEAMNKLQRANPDDPAYDENKRQFQEDIKVMNDLVDKIIADRKASGEQSDDLLTHMLNGKDPETGEPLDDENIRYQIITFLIAGHETTSGLLSFALYFLVKNPHVLQKAAEEAARVLVDPVPSYKQVKQLKYVGMVLNEALRLWPTAPAFSLYAKEDTVLGGEYPLEKGDELMVLIPQLHRDKTIWGDDVEEFRPERFENPSAIPQHAFKPFGNGQRACIGQQFALHEATLVLGMMLKHFDFEDHTNYELDIKETLTLKPEGFVVKAKSKKIPLGGIPSPSTEQSAKKVRKKAENAHNTPLLVLYGSNMGTAEGTARDLADIAMSKGFAPQVATLDSHAGNLPREGAVLIVTASYNGHPPDNAKQFVDWLDQASADEVKGVRYSVFGCGDKNWATTYQKVPAFIDETLAAKGAENIADRGEADASDDFEGTYEEWREHMWSDVAAYFNLDIENSEDNKSTLSLQFVDSAADMPLAKMHGAFSTNVVASKELQQPGSARSTRHLEIELPKEASYQEGDHLGVIPRNYEGIVNRVTARFGLDASQQIRLEAEEEKLAHLPLAKTVSVEELLQYVELQDPVTRTQLRAMAAKTVCPPHKVELEALLEKQAYKEQVLAKRLTMLELLEKYPACEMKFSEFIALLPSIRPRYYSISSSPRVDEKQASITVSVVSGEAWSGYGEYKGIASNYLAELQEGDTITCFISTPQSEFTLPKDPETPLIMVGPGTGVAPFRGFVQARKQLKEQGQSLGEAHLYFGCRSPHEDYLYQEELENAQSEGIITLHTAFSRMPNQPKTYVQHVMEQDGKKLIELLDQGAHFYICGDGSQMAPAVEATLMKSYADVHQVSEADARLWLQQLEEKGRYAKDVWAG

SEQ ID NO: 41 - protein, 1048 aa, Artificial Sequence
  BM3 variant (V78I, A82Q, F87A, M177Y)
AIKEMPQPKTFGELKNLPLLNTDKPVQALMKIADELGEIFKFEAPGRVTRYLSSQRLIKEACDESRFDKNLSQALKFIRDFQGDGLATSWTHEKNWKKAHNILLPSFSQQAMKGYHAMMVDIAVQLVQKWERLNADEHIEVPEDMTRLTLDTIGLCGFNYRFNSFYRDQPHPFITSYVRALDEAMNKLQRANPDDPAYDENKRQFQEDIKVMNDLVDKIIADRKASGEQSDDLLTHMLNGKDPETGEPLDDENIRYQIITFLIAGHETTSGLLSFALYFLVKNPHVLQKAAEEAARVLVDPVPSYKQVKQLKYVGMVLNEALRLWPTAPAFSLYAKEDTVLGGEYPLEKGDELMVLIPQLHRDKTIWGDDVEEFRPERFENPSAIPQHAFKPFGNGQRACIGQQFALHEATLVLGMMLKHFDFEDHTNYELDIKETLTLKPEGFVVKAKSKKIPLGGIPSPSTEQSAKKVRKKAENAHNTPLLVLYGSNMGTAEGTARDLADIAMSKGFAPQVATLDSHAGNLPREGAVLIVTASYNGHPPDNAKQFVDWLDQASADEVKGVRYSVFGCGDKNWATTYQKVPAFIDETLAAKGAENIADRGEADASDDFEGTYEEWREHMWSDVAAYFNLDIENSEDNKSTLSLQFVDSAADMPLAKMHGAFSTNVVASKELQQPGSARSTRHLEIELPKEASYQEGDHLGVIPRNYEGIVNRVTARFGLDASQQIRLEAEEEKLAHLPLAKTVSVEELLQYVELQDPVTRTQLRAMAAKTVCPPHKVELEALLEKQAYKEQVLAKRLTMLELLEKYPACEMKFSEFIALLPSIRPRYYSISSSPRVDEKQASITVSVVSGEAWSGYGEYKGIASNYLAELQEGDTITCFISTPQSEFTLPKDPETPLIMVGPGTGVAPFRGFVQARKQLKEQGQSLGEAHLYFGCRSPHEDYLYQEELENAQSEGIITLHTAFSRMPNQPKTYVQHVMEQDGKKLIELLDQGAHFYICGDGSQMAPAVEATLMKSYADVHQVSEADARLWLQQLEEKGRYAKDVWAG

SEQ ID NO: 42 - protein, 1048 aa, Artificial Sequence
  BM3 variant (V78M, A82Q, F87A, M177Y)
AIKEMPQPKTFGELKNLPLLNTDKPVQALMKIADELGEIFKFEAPGRVTRYLSSQRLIKEACDESRFDKNLSQALKFMRDFQGDGLATSWTHEKNWKKAHNILLPSFSQQAMKGYHAMMVDIAVQLVQKWERLNADEHIEVPEDMTRLTLDTIGLCGFNYRFNSFYRDQPHPFITSYVRALDEAMNKLQRANPDDPAYDENKRQFQEDIKVMNDLVDKIIADRKASGEQSDDLLTHMLNGKDPETGEPLDDENIRYQIITFLIAGHETTSGLLSFALYFLVKNPHVLQKAAEEAARVLVDPVPSYKQVKQLKYVGMVLNEALRLWPTAPAFSLYAKEDTVLGGEYPLEKGDELMVLIPQLHRDKTIWGDDVEEFRPERFENPSAIPQHAFKPFGNGQRACIGQQFALHEATLVLGMMLKHFDFEDHTNYELDIKETLTLKPEGFVVKAKSKKIPLGGIPSPSTEQSAKKVRKKAENAHNTPLLVLYGSNMGTAEGTARDLADIAMSKGFAPQVATLDSHAGNLPREGAVLIVTASYNGHPPDNAKQFVDWLDQASADEVKGVRYSVFGCGDKNWATTYQKVPAFIDETLAAKGAENIADRGEADASDDFEGTYEEWREHMWSDVAAYFNLDIENSEDNKSTLSLQFVDSAADMPLAKMHGAFSTNVVASKELQQPGSARSTRHLEIELPKEASYQEGDHLGVIPRNYEGIVNRVTARFGLDASQQIRLEAEEEKLAHLPLAKTVSVEELLQYVELQDPVTRTQLRAMAAKTVCPPHKVELEALLEKQAYKEQVLAKRLTMLELLEKYPACEMKFSEFIALLPSIRPRYYSISSSPRVDEKQASITVSVVSGEAWSGYGEYKGIASNYLAELQEGDTITCFISTPQSEFTLPKDPETPLIMVGPGTGVAPFRGFVQARKQLKEQGQSLGEAHLYFGCRSPHEDYLYQEELENAQSEGIITLHTAFSRMPNQPKTYVQHVMEQDGKKLIELLDQGAHFYICGDGSQMAPAVEATLMKSYADVHQVSEADARLWLQQLEEKGRYAKDVWAG

SEQ ID NO: 43 - protein, 1048 aa, Artificial Sequence
  BM3 variant (V78Y, A82Q, F87A, M177Y)
AIKEMPQPKTFGELKNLPLLNTDKPVQALMKIADELGEIFKFEAPGRVTRYLSSQRLIKEACDESRFDKNLSQALKFYRDFQGDGLATSWTHEKNWKKAHNILLPSFSQQAMKGYHAMMVDIAVQLVQKWERLNADEHIEVPEDMTRLTLDTIGLCGFNYRFNSFYRDQPHPFITSYVRALDEAMNKLQRANPDDPAYDENKRQFQEDIKVMNDLVDKIIADRKASGEQSDDLLTHMLNGKDPETGEPLDDENIRYQIITFLIAGHETTSGLLSFALYFLVKNPHVLQKAAEEAARVLVDPVPSYKQVKQLKYVGMVLNEALRLWPTAPAFSLYAKEDTVLGGEYPLEKGDELMVLIPQLHRDKTIWGDDVEEFRPERFENPSAIPQHAFKPFGNGQRACIGQQFALHEATLVLGMMLKHFDFEDHTNYELDIKETLTLKPEGFVVKAKSKKIPLGGIPSPSTEQSAKKVRKKAENAHNTPLLVLYGSNMGTAEGTARDLADIAMSKGFAPQVATLDSHAGNLPREGAVLIVTASYNGHPPDNAKQFVDWLDQASADEVKGVRYSVFGCGDKNWATTYQKVPAFIDETLAAKGAENIADRGEADASDDFEGTYEEWREHMWSDVAAYFNLDIENSEDNKSTLSLQFVDSAADMPLAKMHGAFSTNVVASKELQQPGSARSTRHLEIELPKEASYQEGDHLGVIPRNYEGIVNRVTARFGLDASQQIRLEAEEEKLAHLPLAKTVSVEELLQYVELQDPVTRTQLRAMAAKTVCPPHKVELEALLEKQAYKEQVLAKRLTMLELLEKYPACEMKFSEFIALLPSIRPRYYSISSSPRVDEKQASITVSVVSGEAWSGYGEYKGIASNYLAELQEGDTITCFISTPQSEFTLPKDPETPLIMVGPGTGVAPFRGFVQARKQLKEQGQSLGEAHLYFGCRSPHEDYLYQEELENAQSEGIITLHTAFSRMPNQPKTYVQHVMEQDGKKLIELLDQGAHFYICGDGSQMAPAVEATLMKSYADVHQVSEADARLWLQQLEEKGRYAKDVWAG

SEQ ID NO: 44 - protein, 1048 aa, Artificial Sequence
  BM3 variant (V78F, A82E, F87A, M184Y)
AIKEMPQPKTFGELKNLPLLNTDKPVQALMKIADELGEIFKFEAPGRVTRYLSSQRLIKEACDESRFDKNLSQALKFFRDFEGDGLATSWTHEKNWKKAHNILLPSFSQQAMKGYHAMMVDIAVQLVQKWERLNADEHIEVPEDMTRLTLDTIGLCGFNYRFNSFYRDQPHPFITSMVRALDEYMNKLQRANPDDPAYDENKRQFQEDIKVMNDLVDKIIADRKASGEQSDDLLTHMLNGKDPETGEPLDDENIRYQIITFLIAGHETTSGLLSFALYFLVKNPHVLQKAAEEAARVLVDPVPSYKQVKQLKYVGMVLNEALRLWPTAPAFSLYAKEDTVLGGEYPLEKGDELMVLIPQLHRDKTIWGDDVEEFRPERFENPSAIPQHAFKPFGNGQRACIGQQFALHEATLVLGMMLKHFDFEDHTNYELDIKETLTLKPEGFVVKAKSKKIPLGGIPSPSTEQSAKKVRKKAENAHNTPLLVLYGSNMGTAEGTARDLADIAMSKGFAPQVATLDSHAGNLPREGAVLIVTASYNGHPPDNAKQFVDWLDQASADEVKGVRYSVFGCGDKNWATTYQKVPAFIDETLAAKGAENIADRGEADASDDFEGTYEEWREHMWSDVAAYFNLDIENSEDNKSTLSLQFVDSAADMPLAKMHGAFSTNVVASKELQQPGSARSTRHLEIELPKEASYQEGDHLGVIPRNYEGIVNRVTARFGLDASQQIRLEAEEEKLAHLPLAKTVSVEELLQYVELQDPVTRTQLRAMAAKTVCPPHKVELEALLEKQAYKEQVLAKRLTMLELLEKYPACEMKFSEFIALLPSIRPRYYSISSSPRVDEKQASITVSVVSGEAWSGYGEYKGIASNYLAELQEGDTITCFISTPQSEFTLPKDPETPLIMVGPGTGVAPFRGFVQARKQLKEQGQSLGEAHLYFGCRSPHEDYLYQEELENAQSEGIITLHTAFSRMPNQPKTYVQHVMEQDGKKLIELLDQGAHFYICGDGSQMAPAVEATLMKSYADVHQVSEADARLWLQQLEEKGRYAKDVWAG

SEQ ID NO: 45 - protein, 1048 aa, Artificial Sequence
  BM3 variant (V78L, A82E, F87A, M184Y)
AIKEMPQPKTFGELKNLPLLNTDKPVQALMKIADELGEIFKFEAPGRVTRYLSSQRLIKEACDESRFDKNLSQALKFLRDFEGDGLATSWTHEKNWKKAHNILLPSFSQQAMKGYHAMMVDIAVQLVQKWERLNADEHIEVPEDMTRLTLDTIGLCGFNYRFNSFYRDQPHPFITSMVRALDEYMNKLQRANPDDPAYDENKRQFQEDIKVMNDLVDKIIADRKASGEQSDDLLTHMLNGKDPETGEPLDDENIRYQIITFLIAGHETTSGLLSFALYFLVKNPHVLQKAAEEAARVLVDPVPSYKQVKQLKYVGMVLNEALRLWPTAPAFSLYAKEDTVLGGEYPLEKGDELMVLIPQLHRDKTIWGDDVEEFRPERFENPSAIPQHAFKPFGNGQRACIGQQFALHEATLVLGMMLKHFDFEDHTNYELDIKETLTLKPEGFVVKAKSKKIPLGGIPSPSTEQSAKKVRKKAENAHNTPLLVLYGSNMGTAEGTARDLADIAMSKGFAPQVATLDSHAGNLPREGAVLIVTASYNGHPPDNAKQFVDWLDQASADEVKGVRYSVFGCGDKNWATTYQKVPAFIDETLAAKGAENIADRGEADASDDFEGTYEEWREHMWSDVAAYFNLDIENSEDNKSTLSLQFVDSAADMPLAKMHGAFSTNVVASKELQQPGSARSTRHLEIELPKEASYQEGDHLGVIPRNYEGIVNRVTARFGLDASQQIRLEAEEEKLAHLPLAKTVSVEELLQYVELQDPVTRTQLRAMAAKTVCPPHKVELEALLEKQAYKEQVLAKRLTMLELLEKYPACEMKFSEFIALLPSIRPRYYSISSSPRVDEKQASITVSVVSGEAWSGYGEYKGIASNYLAELQEGDTITCFISTPQSEFTLPKDPETPLIMVGPGTGVAPFRGFVQARKQLKEQGQSLGEAHLYFGCRSPHEDYLYQEELENAQSEGIITLHTAFSRMPNQPKTYVQHVMEQDGKKLIELLDQGAHFYICGDGSQMAPAVEATLMKSYADVHQVSEADARLWLQQLEEKGRYAKDVWAG

SEQ ID NO: 46 - protein, 1048 aa, Artificial Sequence
  BM3 variant (V78I, A82E, F87A, M184Y)
AIKEMPQPKTFGELKNLPLLNTDKPVQALMKIADELGEIFKFEAPGRVTRYLSSQRLIKEACDESRFDKNLSQALKFIRDFEGDGLATSWTHEKNWKKAHNILLPSFSQQAMKGYHAMMVDIAVQLVQKWERLNADEHIEVPEDMTRLTLDTIGLCGFNYRFNSFYRDQPHPFITSMVRALDEYMNKLQRANPDDPAYDENKRQFQEDIKVMNDLVDKIIADRKASGEQSDDLLTHMLNGKDPETGEPLDDENIRYQIITFLIAGHETTSGLLSFALYFLVKNPHVLQKAAEEAARVLVDPVPSYKQVKQLKYVGMVLNEALRLWPTAPAFSLYAKEDTVLGGEYPLEKGDELMVLIPQLHRDKTIWGDDVEEFRPERFENPSAIPQHAFKPFGNGQRACIGQQFALHEATLVLGMMLKHFDFEDHTNYELDIKETLTLKPEGFVVKAKSKKIPLGGIPSPSTEQSAKKVRKKAENAHNTPLLVLYGSNMGTAEGTARDLADIAMSKGFAPQVATLDSHAGNLPREGAVLIVTASYNGHPPDNAKQFVDWLDQASADEVKGVRYSVFGCGDKNWATTYQKVPAFIDETLAAKGAENIADRGEADASDDFEGTYEEWREHMWSDVAAYFNLDIENSEDNKSTLSLQFVDSAADMPLAKMHGAFSTNVVASKELQQPGSARSTRHLEIELPKEASYQEGDHLGVIPRNYEGIVNRVTARFGLDASQQIRLEAEEEKLAHLPLAKTVSVEELLQYVELQDPVTRTQLRAMAAKTVCPPHKVELEALLEKQAYKEQVLAKRLTMLELLEKYPACEMKFSEFIALLPSIRPRYYSISSSPRVDEKQASITVSVVSGEAWSGYGEYKGIASNYLAELQEGDTITCFISTPQSEFTLPKDPETPLIMVGPGTGVAPFRGFVQARKQLKEQGQSLGEAHLYFGCRSPHEDYLYQEELENAQSEGIITLHTAFSRMPNQPKTYVQHVMEQDGKKLIELLDQGAHFYICGDGSQMAPAVEATLMKSYADVHQVSEADARLWLQQLEEKGRYAKDVWAG

SEQ ID NO: 47 - protein, 1048 aa, Artificial Sequence
  BM3 variant (V78M, A82E, F87A, M184Y)
AIKEMPQPKTFGELKNLPLLNTDKPVQALMKIADELGEIFKFEAPGRVTRYLSSQRLIKEACDESRFDKNLSQALKFMRDFEGDGLATSWTHEKNWKKAHNILLPSFSQQAMKGYHAMMVDIAVQLVQKWERLNADEHIEVPEDMTRLTLDTIGLCGFNYRFNSFYRDQPHPFITSMVRALDEYMNKLQRANPDDPAYDENKRQFQEDIKVMNDLVDKIIADRKASGEQSDDLLTHMLNGKDPETGEPLDDENIRYQIITFLIAGHETTSGLLSFALYFLVKNPHVLQKAAEEAARVLVDPVPSYKQVKQLKYVGMVLNEALRLWPTAPAFSLYAKEDTVLGGEYPLEKGDELMVLIPQLHRDKTIWGDDVEEFRPERFENPSAIPQHAFKPFGNGQRACIGQQFALHEATLVLGMMLKHFDFEDHTNYELDIKETLTLKPEGFVVKAKSKKIPLGGIPSPSTEQSAKKVRKKAENAHNTPLLVLYGSNMGTAEGTARDLADIAMSKGFAPQVATLDSHAGNLPREGAVLIVTASYNGHPPDNAKQFVDWLDQASADEVKGVRYSVFGCGDKNWATTYQKVPAFIDETLAAKGAENIADRGEADASDDFEGTYEEWREHMWSDVAAYFNLDIENSEDNKSTLSLQFVDSAADMPLAKMHGAFSTNVVASKELQQPGSARSTRHLEIELPKEASYQEGDHLGVIPRNYEGIVNRVTARFGLDASQQIRLEAEEEKLAHLPLAKTVSVEELLQYVELQDPVTRTQLRAMAAKTVCPPHKVELEALLEKQAYKEQVLAKRLTMLELLEKYPACEMKFSEFIALLPSIRPRYYSISSSPRVDEKQASITVSVVSGEAWSGYGEYKGIASNYLAELQEGDTITCFISTPQSEFTLPKDPETPLIMVGPGTGVAPFRGFVQARKQLKEQGQSLGEAHLYFGCRSPHEDYLYQEELENAQSEGIITLHTAFSRMPNQPKTYVQHVMEQDGKKLIELLDQGAHFYICGDGSQMAPAVEATLMKSYADVHQVSEADARLWLQQLEEKGRYAKDVWAG

SEQ ID NO: 48 - protein, 1048 aa, Artificial Sequence
  BM3 variant (V78Y, A82E, F87A, M184Y)
AIKEMPQPKTFGELKNLPLLNTDKPVQALMKIADELGEIFKFEAPGRVTRYLSSQRLIKEACDESRFDKNLSQALKFYRDFEGDGLATSWTHEKNWKKAHNILLPSFSQQAMKGYHAMMVDIAVQLVQKWERLNADEHIEVPEDMTRLTLDTIGLCGFNYRFNSFYRDQPHPFITSMVRALDEYMNKLQRANPDDPAYDENKRQFQEDIKVMNDLVDKIIADRKASGEQSDDLLTHMLNGKDPETGEPLDDENIRYQIITFLIAGHETTSGLLSFALYFLVKNPHVLQKAAEEAARVLVDPVPSYKQVKQLKYVGMVLNEALRLWPTAPAFSLYAKEDTVLGGEYPLEKGDELMVLIPQLHRDKTIWGDDVEEFRPERFENPSAIPQHAFKPFGNGQRACIGQQFALHEATLVLGMMLKHFDFEDHTNYELDIKETLTLKPEGFVVKAKSKKIPLGGIPSPSTEQSAKKVRKKAENAHNTPLLVLYGSNMGTAEGTARDLADIAMSKGFAPQVATLDSHAGNLPREGAVLIVTASYNGHPPDNAKQFVDWLDQASADEVKGVRYSVFGCGDKNWATTYQKVPAFIDETLAAKGAENIADRGEADASDDFEGTYEEWREHMWSDVAAYFNLDIENSEDNKSTLSLQFVDSAADMPLAKMHGAFSTNVVASKELQQPGSARSTRHLEIELPKEASYQEGDHLGVIPRNYEGIVNRVTARFGLDASQQIRLEAEEEKLAHLPLAKTVSVEELLQYVELQDPVTRTQLRAMAAKTVCPPHKVELEALLEKQAYKEQVLAKRLTMLELLEKYPACEMKFSEFIALLPSIRPRYYSISSSPRVDEKQASITVSVVSGEAWSGYGEYKGIASNYLAELQEGDTITCFISTPQSEFTLPKDPETPLIMVGPGTGVAPFRGFVQARKQLKEQGQSLGEAHLYFGCRSPHEDYLYQEELENAQSEGIITLHTAFSRMPNQPKTYVQHVMEQDGKKLIELLDQGAHFYICGDGSQMAPAVEATLMKSYADVHQVSEADARLWLQQLEEKGRYAKDVWAG

SEQ ID NO: 49 - protein, 1048 aa, Artificial Sequence
  BM3 variant (V78F, A82P, F87A, M184Y)
AIKEMPQPKTFGELKNLPLLNTDKPVQALMKIADELGEIFKFEAPGRVTRYLSSQRLIKEACDESRFDKNLSQALKFFRDFPGDGLATSWTHEKNWKKAHNILLPSFSQQAMKGYHAMMVDIAVQLVQKWERLNADEHIEVPEDMTRLTLDTIGLCGFNYRFNSFYRDQPHPFITSMVRALDEYMNKLQRANPDDPAYDENKRQFQEDIKVMNDLVDKIIADRKASGEQSDDLLTHMLNGKDPETGEPLDDENIRYQIITFLIAGHETTSGLLSFALYFLVKNPHVLQKAAEEAARVLVDPVPSYKQVKQLKYVGMVLNEALRLWPTAPAFSLYAKEDTVLGGEYPLEKGDELMVLIPQLHRDKTIWGDDVEEFRPERFENPSAIPQHAFKPFGNGQRACIGQQFALHEATLVLGMMLKHFDFEDHTNYELDIKETLTLKPEGFVVKAKSKKIPLGGIPSPSTEQSAKKVRKKAENAHNTPLLVLYGSNMGTAEGTARDLADIAMSKGFAPQVATLDSHAGNLPREGAVLIVTASYNGHPPDNAKQFVDWLDQASADEVKGVRYSVFGCGDKNWATTYQKVPAFIDETLAAKGAENIADRGEADASDDFEGTYEEWREHMWSDVAAYFNLDIENSEDNKSTLSLQFVDSAADMPLAKMHGAFSTNVVASKELQQPGSARSTRHLEIELPKEASYQEGDHLGVIPRNYEGIVNRVTARFGLDASQQIRLEAEEEKLAHLPLAKTVSVEELLQYVELQDPVTRTQLRAMAAKTVCPPHKVELEALLEKQAYKEQVLAKRLTMLELLEKYPACEMKFSEFIALLPSIRPRYYSISSSPRVDEKQASITVSVVSGEAWSGYGEYKGIASNYLAELQEGDTITCFISTPQSEFTLPKDPETPLIMVGPGTGVAPFRGFVQARKQLKEQGQSLGEAHLYFGCRSPHEDYLYQEELENAQSEGIITLHTAFSRMPNQPKTYVQHVMEQDGKKLIELLDQGAHFYICGDGSQMAPAVEATLMKSYADVHQVSEADARLWLQQLEEKGRYAKDVWAG

SEQ ID NO: 50 - protein, 1048 aa, Artificial Sequence
  BM3 variant (V78L, A82P, F87A, M184Y)
AIKEMPQPKTFGELKNLPLLNTDKPVQALMKIADELGEIFKFEAPGRVTRYLSSQRLIKEACDESRFDKNLSQALKFLRDFPGDGLATSWTHEKNWKKAHNILLPSFSQQAMKGYHAMMVDIAVQLVQKWERLNADEHIEVPEDMTRLTLDTIGLCGFNYRFNSFYRDQPHPFITSMVRALDEYMNKLQRANPDDPAYDENKRQFQEDIKVMNDLVDKIIADRKASGEQSDDLLTHMLNGKDPETGEPLDDENIRYQIITFLIAGHETTSGLLSFALYFLVKNPHVLQKAAEEAARVLVDPVPSYKQVKQLKYVGMVLNEALRLWPTAPAFSLYAKEDTVLGGEYPLEKGDELMVLIPQLHRDKTIWGDDVEEFRPERFENPSAIPQHAFKPFGNGQRACIGQQFALHEATLVLGMMLKHFDFEDHTNYELDIKETLTLKPEGFVVKAKSKKIPLGGIPSPSTEQSAKKVRKKAENAHNTPLLVLYGSNMGTAEGTARDLADIAMSKGFAPQVATLDSHAGNLPREGAVLIVTASYNGHPPDNAKQFVDWLDQASADEVKGVRYSVFGCGDKNWATTYQKVPAFIDETLAAKGAENIADRGEADASDDFEGTYEEWREHMWSDVAAYFNLDIENSEDNKSTLSLQFVDSAADMPLAKMHGAFSTNVVASKELQQPGSARSTRHLEIELPKEASYQEGDHLGVIPRNYEGIVNRVTARFGLDASQQIRLEAEEEKLAHLPLAKTVSVEELLQYVELQDPVTRTQLRAMAAKTVCPPHKVELEALLEKQAYKEQVLAKRLTMLELLEKYPACEMKFSEFIALLPSIRPRYYSISSSPRVDEKQASITVSVVSGEAWSGYGEYKGIASNYLAELQEGDTITCFISTPQSEFTLPKDPETPLIMVGPGTGVAPFRGFVQARKQLKEQGQSLGEAHLYFGCRSPHEDYLYQEELENAQSEGIITLHTAFSRMPNQPKTYVQHVMEQDGKKLIELLDQGAHFYICGDGSQMAPAVEATLMKSYADVHQVSEADARLWLQQLEEKGRYAKDVWAG

SEQ ID NO: 51 - protein, 1048 aa, Artificial Sequence
  BM3 variant (V78I, A82P, F87A, M184Y)
AIKEMPQPKTFGELKNLPLLNTDKPVQALMKIADELGEIFKFEAPGRVTRYLSSQRLIKEACDESRFDKNLSQALKFIRDFPGDGLATSWTHEKNWKKAHNILLPSFSQQAMKGYHAMMVDIAVQLVQKWERLNADEHIEVPEDMTRLTLDTIGLCGFNYRFNSFYRDQPHPFITSMVRALDEYMNKLQRANPDDPAYDENKRQFQEDIKVMNDLVDKIIADRKASGEQSDDLLTHMLNGKDPETGEPLDDENIRYQIITFLIAGHETTSGLLSFALYFLVKNPHVLQKAAEEAARVLVDPVPSYKQVKQLKYVGMVLNEALRLWPTAPAFSLYAKEDTVLGGEYPLEKGDELMVLIPQLHRDKTIWGDDVEEFRPERFENPSAIPQHAFKPFGNGQRACIGQQFALHEATLVLGMMLKHFDFEDHTNYELDIKETLTLKPEGFVVKAKSKKIPLGGIPSPSTEQSAKKVRKKAENAHNTPLLVLYGSNMGTAEGTARDLADIAMSKGFAPQVATLDSHAGNLPREGAVLIVTASYNGHPPDNAKQFVDWLDQASADEVKGVRYSVFGCGDKNWATTYQKVPAFIDETLAAKGAENIADRGEADASDDFEGTYEEWREHMWSDVAAYFNLDIENSEDNKSTLSLQFVDSAADMPLAKMHGAFSTNVVASKELQQPGSARSTRHLEIELPKEASYQEGDHLGVIPRNYEGIVNRVTARFGLDASQQIRLEAEEEKLAHLPLAKTVSVEELLQYVELQDPVTRTQLRAMAAKTVCPPHKVELEALLEKQAYKEQVLAKRLTMLELLEKYPACEMKFSEFIALLPSIRPRYYSISSSPRVDEKQASITVSVVSGEAWSGYGEYKGIASNYLAELQEGDTITCFISTPQSEFTLPKDPETPLIMVGPGTGVAPFRGFVQARKQLKEQGQSLGEAHLYFGCRSPHEDYLYQEELENAQSEGIITLHTAFSRMPNQPKTYVQHVMEQDGKKLIELLDQGAHFYICGDGSQMAPAVEATLMKSYADVHQVSEADARLWLQQLEEKGRYAKDVWAG

SEQ ID NO: 52 - protein, 1048 aa, Artificial Sequence
  BM3 variant (V78M, A82P, F87A, M184Y)
AIKEMPQPKTFGELKNLPLLNTDKPVQALMKIADELGEIFKFEAPGRVTRYLSSQRLIKEACDESRFDKNLSQALKFMRDFPGDGLATSWTHEKNWKKAHNILLPSFSQQAMKGYHAMMVDIAVQLVQKWERLNADEHIEVPEDMTRLTLDTIGLCGFNYRFNSFYRDQPHPFITSMVRALDEYMNKLQRANPDDPAYDENKRQFQEDIKVMNDLVDKIIADRKASGEQSDDLLTHMLNGKDPETGEPLDDENIRYQIITFLIAGHETTSGLLSFALYFLVKNPHVLQKAAEEAARVLVDPVPSYKQVKQLKYVGMVLNEALRLWPTAPAFSLYAKEDTVLGGEYPLEKGDELMVLIPQLHRDKTIWGDDVEEFRPERFENPSAIPQHAFKPFGNGQRACIGQQFALHEATLVLGMMLKHFDFEDHTNYELDIKETLTLKPEGFVVKAKSKKIPLGGIPSPSTEQSAKKVRKKAENAHNTPLLVLYGSNMGTAEGTARDLADIAMSKGFAPQVATLDSHAGNLPREGAVLIVTASYNGHPPDNAKQFVDWLDQASADEVKGVRYSVFGCGDKNWATTYQKVPAFIDETLAAKGAENIADRGEADASDDFEGTYEEWREHMWSDVAAYFNLDIENSEDNKSTLSLQFVDSAADMPLAKMHGAFSTNVVASKELQQPGSARSTRHLEIELPKEASYQEGDHLGVIPRNYEGIVNRVTARFGLDASQQIRLEAEEEKLAHLPLAKTVSVEELLQYVELQDPVTRTQLRAMAAKTVCPPHKVELEALLEKQAYKEQVLAKRLTMLELLEKYPACEMKFSEFIALLPSIRPRYYSISSSPRVDEKQASITVSVVSGEAWSGYGEYKGIASNYLAELQEGDTITCFISTPQSEFTLPKDPETPLIMVGPGTGVAPFRGFVQARKQLKEQGQSLGEAHLYFGCRSPHEDYLYQEELENAQSEGIITLHTAFSRMPNQPKTYVQHVMEQDGKKLIELLDQGAHFYICGDGSQMAPAVEATLMKSYADVHQVSEADARLWLQQLEEKGRYAKDVWAG

SEQ ID NO: 53 - protein, 1048 aa, Artificial Sequence
  BM3 variant (V78Y, A82P, F87A, M184Y)
AIKEMPQPKTFGELKNLPLLNTDKPVQALMKIADELGEIFKFEAPGRVTRYLSSQRLIKEACDESRFDKNLSQALKFYRDFPGDGLATSWTHEKNWKKAHNILLPSFSQQAMKGYHAMMVDIAVQLVQKWERLNADEHIEVPEDMTRLTLDTIGLCGFNYRFNSFYRDQPHPFITSMVRALDEYMNKLQRANPDDPAYDENKRQFQEDIKVMNDLVDKIIADRKASGEQSDDLLTHMLNGKDPETGEPLDDENIRYQIITFLIAGHETTSGLLSFALYFLVKNPHVLQKAAEEAARVLVDPVPSYKQVKQLKYVGMVLNEALRLWPTAPAFSLYAKEDTVLGGEYPLEKGDELMVLIPQLHRDKTIWGDDVEEFRPERFENPSAIPQHAFKPFGNGQRACIGQQFALHEATLVLGMMLKHFDFEDHTNYELDIKETLTLKPEGFVVKAKSKKIPLGGIPSPSTEQSAKKVRKKAENAHNTPLLVLYGSNMGTAEGTARDLADIAMSKGFAPQVATLDSHAGNLPREGAVLIVTASYNGHPPDNAKQFVDWLDQASADEVKGVRYSVFGCGDKNWATTYQKVPAFIDETLAAKGAENIADRGEADASDDFEGTYEEWREHMWSDVAAYFNLDIENSEDNKSTLSLQFVDSAADMPLAKMHGAFSTNVVASKELQQPGSARSTRHLEIELPKEASYQEGDHLGVIPRNYEGIVNRVTARFGLDASQQIRLEAEEEKLAHLPLAKTVSVEELLQYVELQDPVTRTQLRAMAAKTVCPPHKVELEALLEKQAYKEQVLAKRLTMLELLEKYPACEMKFSEFIALLPSIRPRYYSISSSPRVDEKQASITVSVVSGEAWSGYGEYKGIASNYLAELQEGDTITCFISTPQSEFTLPKDPETPLIMVGPGTGVAPFRGFVQARKQLKEQGQSLGEAHLYFGCRSPHEDYLYQEELENAQSEGIITLHTAFSRMPNQPKTYVQHVMEQDGKKLIELLDQGAHFYICGDGSQMAPAVEATLMKSYADVHQVSEADARLWLQQLEEKGRYAKDVWAG

SEQ ID NO: 54 - protein, 1048 aa, Artificial Sequence
  BM3 variant (V78F, A82Q, F87A, M184Y)
AIKEMPQPKTFGELKNLPLLNTDKPVQALMKIADELGEIFKFEAPGRVTRYLSSQRLIKEACDESRFDKNLSQALKFFRDFQGDGLATSWTHEKNWKKAHNILLPSFSQQAMKGYHAMMVDIAVQLVQKWERLNADEHIEVPEDMTRLTLDTIGLCGFNYRFNSFYRDQPHPFITSMVRALDEYMNKLQRANPDDPAYDENKRQFQEDIKVMNDLVDKIIADRKASGEQSDDLLTHMLNGKDPETGEPLDDENIRYQIITFLIAGHETTSGLLSFALYFLVKNPHVLQKAAEEAARVLVDPVPSYKQVKQLKYVGMVLNEALRLWPTAPAFSLYAKEDTVLGGEYPLEKGDELMVLIPQLHRDKTIWGDDVEEFRPERFENPSAIPQHAFKPFGNGQRACIGQQFALHEATLVLGMMLKHFDFEDHTNYELDIKETLTLKPEGFVVKAKSKKIPLGGIPSPSTEQSAKKVRKKAENAHNTPLLVLYGSNMGTAEGTARDLADIAMSKGFAPQVATLDSHAGNLPREGAVLIVTASYNGHPPDNAKQFVDWLDQASADEVKGVRYSVFGCGDKNWATTYQKVPAFIDETLAAKGAENIADRGEADASDDFEGTYEEWREHMWSDVAAYFNLDIENSEDNKSTLSLQFVDSAADMPLAKMHGAFSTNVVASKELQQPGSARSTRHLEIELPKEASYQEGDHLGVIPRNYEGIVNRVTARFGLDASQQIRLEAEEEKLAHLPLAKTVSVEELLQYVELQDPVTRTQLRAMAAKTVCPPHKVELEALLEKQAYKEQVLAKRLTMLELLEKYPACEMKFSEFIALLPSIRPRYYSISSSPRVDEKQASITVSVVSGEAWSGYGEYKGIASNYLAELQEGDTITCFISTPQSEFTLPKDPETPLIMVGPGTGVAPFRGFVQARKQLKEQGQSLGEAHLYFGCRSPHEDYLYQEELENAQSEGIITLHTAFSRMPNQPKTYVQHVMEQDGKKLIELLDQGAHFYICGDGSQMAPAVEATLMKSYADVHQVSEADARLWLQQLEEKGRYAKDVWAG

SEQ ID NO: 55 - protein, 1048 aa, Artificial Sequence
  BM3 variant (V78L, A82Q, F87A, M184Y)
AIKEMPQPKTFGELKNLPLLNTDKPVQALMKIADELGEIFKFEAPGRVTRYLSSQRLIKEACDESRFDKNLSQALKFLRDFQGDGLATSWTHEKNWKKAHNILLPSFSQQAMKGYHAMMVDIAVQLVQKWERLNADEHIEVPEDMTRLTLDTIGLCGFNYRFNSFYRDQPHPFITSMVRALDEYMNKLQRANPDDPAYDENKRQFQEDIKVMNDLVDKIIADRKASGEQSDDLLTHMLNGKDPETGEPLDDENIRYQIITFLIAGHETTSGLLSFALYFLVKNPHVLQKAAEEAARVLVDPVPSYKQVKQLKYVGMVLNEALRLWPTAPAFSLYAKEDTVLGGEYPLEKGDELMVLIPQLHRDKTIWGDDVEEFRPERFENPSAIPQHAFKPFGNGQRACIGQQFALHEATLVLGMMLKHFDFEDHTNYELDIKETLTLKPEGFVVKAKSKKIPLGGIPSPSTEQSAKKVRKKAENAHNTPLLVLYGSNMGTAEGTARDLADIAMSKGFAPQVATLDSHAGNLPREGAVLIVTASYNGHPPDNAKQFVDWLDQASADEVKGVRYSVFGCGDKNWATTYQKVPAFIDETLAAKGAENIADRGEADASDDFEGTYEEWREHMWSDVAAYFNLDIENSEDNKSTLSLQFVDSAADMPLAKMHGAFSTNVVASKELQQPGSARSTRHLEIELPKEASYQEGDHLGVIPRNYEGIVNRVTARFGLDASQQIRLEAEEEKLAHLPLAKTVSVEELLQYVELQDPVTRTQLRAMAAKTVCPPHKVELEALLEKQAYKEQVLAKRLTMLELLEKYPACEMKFSEFIALLPSIRPRYYSISSSPRVDEKQASITVSVVSGEAWSGYGEYKGIASNYLAELQEGDTITCFISTPQSEFTLPKDPETPLIMVGPGTGVAPFRGFVQARKQLKEQGQSLGEAHLYFGCRSPHEDYLYQEELENAQSEGIITLHTAFSRMPNQPKTYVQHVMEQDGKKLIELLDQGAHFYICGDGSQMAPAVEATLMKSYADVHQVSEADARLWLQQLEEKGRYAKDVWAG

SEQ ID NO: 56 - protein, 1048 aa, Artificial Sequence
  BM3 variant (V78I, A82Q, F87A, M184Y)
AIKEMPQPKTFGELKNLPLLNTDKPVQALMKIADELGEIFKFEAPGRVTRYLSSQRLIKEACDESRFDKNLSQALKFIRDFQGDGLATSWTHEKNWKKAHNILLPSFSQQAMKGYHAMMVDIAVQLVQKWERLNADEHIEVPEDMTRLTLDTIGLCGFNYRFNSFYRDQPHPFITSMVRALDEYMNKLQRANPDDPAYDENKRQFQEDIKVMNDLVDKIIADRKASGEQSDDLLTHMLNGKDPETGEPLDDENIRYQIITFLIAGHETTSGLLSFALYFLVKNPHVLQKAAEEAARVLVDPVPSYKQVKQLKYVGMVLNEALRLWPTAPAFSLYAKEDTVLGGEYPLEKGDELMVLIPQLHRDKTIWGDDVEEFRPERFENPSAIPQHAFKPFGNGQRACIGQQFALHEATLVLGMMLKHFDFEDHTNYELDIKETLTLKPEGFVVKAKSKKIPLGGIPSPSTEQSAKKVRKKAENAHNTPLLVLYGSNMGTAEGTARDLADIAMSKGFAPQVATLDSHAGNLPREGAVLIVTASYNGHPPDNAKQFVDWLDQASADEVKGVRYSVFGCGDKNWATTYQKVPAFIDETLAAKGAENIADRGEADASDDFEGTYEEWREHMWSDVAAYFNLDIENSEDNKSTLSLQFVDSAADMPLAKMHGAFSTNVVASKELQQPGSARSTRHLEIELPKEASYQEGDHLGVIPRNYEGIVNRVTARFGLDASQQIRLEAEEEKLAHLPLAKTVSVEELLQYVELQDPVTRTQLRAMAAKTVCPPHKVELEALLEKQAYKEQVLAKRLTMLELLEKYPACEMKFSEFIALLPSIRPRYYSISSSPRVDEKQASITVSVVSGEAWSGYGEYKGIASNYLAELQEGDTITCFISTPQSEFTLPKDPETPLIMVGPGTGVAPFRGFVQARKQLKEQGQSLGEAHLYFGCRSPHEDYLYQEELENAQSEGIITLHTAFSRMPNQPKTYVQHVMEQDGKKLIELLDQGAHFYICGDGSQMAPAVEATLMKSYADVHQVSEADARLWLQQLEEKGRYAKDVWAG

SEQ ID NO: 57 - protein, 1048 aa, Artificial Sequence
  BM3 variant (V78M, A82Q, F87A, M184Y)
AIKEMPQPKTFGELKNLPLLNTDKPVQALMKIADELGEIFKFEAPGRVTRYLSSQRLIKEACDESRFDKNLSQALKFMRDFQGDGLATSWTHEKNWKKAHNILLPSFSQQAMKGYHAMMVDIAVQLVQKWERLNADEHIEVPEDMTRLTLDTIGLCGFNYRFNSFYRDQPHPFITSMVRALDEYMNKLQRANPDDPAYDENKRQFQEDIKVMNDLVDKIIADRKASGEQSDDLLTHMLNGKDPETGEPLDDENIRYQIITFLIAGHETTSGLLSFALYFLVKNPHVLQKAAEEAARVLVDPVPSYKQVKQLKYVGMVLNEALRLWPTAPAFSLYAKEDTVLGGEYPLEKGDELMVLIPQLHRDKTIWGDDVEEFRPERFENPSAIPQHAFKPFGNGQRACIGQQFALHEATLVLGMMLKHFDFEDHTNYELDIKETLTLKPEGFVVKAKSKKIPLGGIPSPSTEQSAKKVRKKAENAHNTPLLVLYGSNMGTAEGTARDLADIAMSKGFAPQVATLDSHAGNLPREGAVLIVTASYNGHPPDNAKQFVDWLDQASADEVKGVRYSVFGCGDKNWATTYQKVPAFIDETLAAKGAENIADRGEADASDDFEGTYEEWREHMWSDVAAYFNLDIENSEDNKSTLSLQFVDSAADMPLAKMHGAFSTNVVASKELQQPGSARSTRHLEIELPKEASYQEGDHLGVIPRNYEGIVNRVTARFGLDASQQIRLEAEEEKLAHLPLAKTVSVEELLQYVELQDPVTRTQLRAMAAKTVCPPHKVELEALLEKQAYKEQVLAKRLTMLELLEKYPACEMKFSEFIALLPSIRPRYYSISSSPRVDEKQASITVSVVSGEAWSGYGEYKGIASNYLAELQEGDTITCFISTPQSEFTLPKDPETPLIMVGPGTGVAPFRGFVQARKQLKEQGQSLGEAHLYFGCRSPHEDYLYQEELENAQSEGIITLHTAFSRMPNQPKTYVQHVMEQDGKKLIELLDQGAHFYICGDGSQMAPAVEATLMKSYADVHQVSEADARLWLQQLEEKGRYAKDVWAG

SEQ ID NO: 58 - protein, 1048 aa, Artificial Sequence
  BM3 variant (V78Y, A82Q, F87A, M184Y)
AIKEMPQPKTFGELKNLPLLNTDKPVQALMKIADELGEIFKFEAPGRVTRYLSSQRLIKEACDESRFDKNLSQALKFYRDFQGDGLATSWTHEKNWKKAHNILLPSFSQQAMKGYHAMMVDIAVQLVQKWERLNADEHIEVPEDMTRLTLDTIGLCGFNYRFNSFYRDQPHPFITSMVRALDEYMNKLQRANPDDPAYDENKRQFQEDIKVMNDLVDKIIADRKASGEQSDDLLTHMLNGKDPETGEPLDDENIRYQIITFLIAGHETTSGLLSFALYFLVKNPHVLQKAAEEAARVLVDPVPSYKQVKQLKYVGMVLNEALRLWPTAPAFSLYAKEDTVLGGEYPLEKGDELMVLIPQLHRDKTIWGDDVEEFRPERFENPSAIPQHAFKPFGNGQRACIGQQFALHEATLVLGMMLKHFDFEDHTNYELDIKETLTLKPEGFVVKAKSKKIPLGGIPSPSTEQSAKKVRKKAENAHNTPLLVLYGSNMGTAEGTARDLADIAMSKGFAPQVATLDSHAGNLPREGAVLIVTASYNGHPPDNAKQFVDWLDQASADEVKGVRYSVFGCGDKNWATTYQKVPAFIDETLAAKGAENIADRGEADASDDFEGTYEEWREHMWSDVAAYFNLDIENSEDNKSTLSLQFVDSAADMPLAKMHGAFSTNVVASKELQQPGSARSTRHLEIELPKEASYQEGDHLGVIPRNYEGIVNRVTARFGLDASQQIRLEAEEEKLAHLPLAKTVSVEELLQYVELQDPVTRTQLRAMAAKTVCPPHKVELEALLEKQAYKEQVLAKRLTMLELLEKYPACEMKFSEFIALLPSIRPRYYSISSSPRVDEKQASITVSVVSGEAWSGYGEYKGIASNYLAELQEGDTITCFISTPQSEFTLPKDPETPLIMVGPGTGVAPFRGFVQARKQLKEQGQSLGEAHLYFGCRSPHEDYLYQEELENAQSEGIITLHTAFSRMPNQPKTYVQHVMEQDGKKLIELLDQGAHFYICGDGSQMAPAVEATLMKSYADVHQVSEADARLWLQQLEEKGRYAKDVWAG

SEQ ID NO: 59 - DNA, 3228 bp, Artificial Sequence
  BM3 WT
atgaaacatcaccatcaccatcaccccatgagcgattacgacatccccactactgagaatctttattttcagggcgccatggcaattaaagaaatgcctcagccaaaaacgtttggagagcttaaaaatttaccgttattaaacacagataaaccggttcaagctttgatgaaaattgcggatgaattaggagaaatctttaaattcgaggcgcctggtcgtgtaacgcgctacttatcaagtcagcgtctaattaaagaagcatgcgatgaatcacgctttgataaaaacttaagtcaagcgcttaaatttgtacgtgattttgcaggagacgggttatttacaagctggacgcatgaaaaaaattggaaaaaagcgcataatatcttacttccaagcttcagtcagcaggcaatgaaaggctatcatgcgatgatggtcgatatcgccgtgcagcttgttcaaaagtgggagcgtctaaatgcagatgagcatattgaagtaccggaagacatgacacgtttaacgcttgatacaattggtctttgcggctttaactatcgctttaacagcttttaccgagatcagcctcatccatttattacaagtatggtccgtgcactggatgaagcaatgaacaagctgcagcgagcaaatccagacgacccagcttatgatgaaaacaagcgccagtttcaagaagatatcaaggtgatgaacgacctagtagataaaattattgcagatcgcaaagcaagcggtgaacaaagcgatgatttattaacgcatatgctaaacggaaaagatccagaaacgggtgagccgcttgatgacgagaacattcgctatcaaattattacattcttaattgcgggacacgaaacaacaagtggtcttttatcatttgcgctgtatttcttagtgaaaaatccacatgtattacaaaaagcagcagaagaagcagcacgagttctagtagatcctgttccaagctacaaacaagtcaaacagcttaaatatgtcggcatggtcttaaacgaagcgctgcgcttatggccaactgctcctgcgttttccctatatgcaaaagaagatacggtgcttggaggagaatatcctttagaaaaaggcgacgaactaatggttctgattcctcagcttcaccgtgataaaacaatttggggagacgatgtggaagagttccgtccagagcgttttgaaaatccaagtgcgattccgcagcatgcgtttaaaccgtttggaaacggtcagcgtgcgtgtatcggtcagcagttcgctcttcatgaagcaacgctggtacttggtatgatgctaaaacactttgactttgaagatcatacaaactacgagctggatattaaagaaactttaacgttaaaacctgaaggctttgtggtaaaagcaaaatcgaaaaaaattccgcttggcggtattccttcacctagcactgaacagtctgctaaaaaagtacgcaaaaaggcagaaaacgctcataatacgccgctgcttgtgctatacggttcaaatatgggaacagctgaaggaacggcgcgtgatttagcagatattgcaatgagcaaaggatttgcaccgcaggtcgcaacgcttgattcacacgccggaaatcttccgcgcgaaggagctgtattaattgtaacggcgtcttataacggtcatccgcctgataacgcaaagcaatttgtcgactggttagaccaagcgtctgctgatgaagtaaaaggcgttcgctactccgtatttggatgcggcgataaaaactgggctactacgtatcaaaaagtgcctgcttttatcgatgaaacgcttgccgctaaaggggcagaaaacatcgctgaccgcggtgaagcagatgcaagcgacgactttgaaggcacatatgaagaatggcgtgaacatatgtggagtgacgtagcagcctactttaacctcgacattgaaaacagtgaagataataaatctactctttcacttcaatttgtcgacagcgccgcggatatgccgcttgcgaaaatgcacggtgcgttttcaacgaacgtcgtagcaagcaaagaacttcaacagccaggcagtgcacgaagcacgcgacatcttgaaattgaacttccaaaagaagcttcttatcaagaaggagatcatttaggtgttattcctcgcaactatgaaggaatagtaaaccgtgtaacagcaaggttcggcctagatgcatcacagcaaatccgtctggaagcagaagaagaaaaattagctcatttgccactcgctaaaacagtatccgtagaagagcttctgcaatacgtggagcttcaagatcctgttacgcgcacgcagcttcgcgcaatggctgctaaaacggtctgcccgccgcataaagtagagcttgaagccttgcttgaaaagcaagcctacaaagaacaagtgctggcaaaacgtttaacaatgcttgaactgcttgaaaaatacccggcgtgtgaaatgaaattcagcgaatttatcgcccttctgccaagcatacgcccgcgctattactcgatttcttcatcacctcgtgtcgatgaaaaacaagcaagcatcacggtcagcgttgtctcaggagaagcgtggagcggatatggagaatataaaggaattgcgtcgaactatcttgccgagctgcaagaaggagatacgattacgtgctttatttccacaccgcagtcagaatttacgctgccaaaagaccctgaaacgccgcttatcatggtcggaccgggaacaggcgtcgcgccgtttagaggctttgtgcaggcgcgcaaacagctaaaagaacaaggacagtcacttggagaagcacatttatacttcggctgccgttcacctcatgaagactatctgtatcaagaagagcttgaaaacgcccaaagcgaaggcatcattacgcttcataccgctttttctcgcatgccaaatcagccgaaaacatacgttcagcacgtaatggaacaagacggcaagaaattgattgaacttcttgatcaaggagcgcacttctatatttgcggagacggaagccaaatggcacctgccgttgaagcaacgcttatgaaaagctatgctgacgttcaccaagtgagtgaagcagacgctcgcttatggctgcagcagctagaagaaaaaggccgatacgcaaaagacgtgtgggctgggtaa

SEQ ID NO: 60 - DNA, 3228 bp, Artificial Sequence
  BM3-254 (V78Y, A82E, F87A)
atgaaacatcaccatcaccatcaccccatgagcgattacgacatccccactactgagaatctttattttcagggcgccatggcaattaaagaaatgcctcagccaaaaacgtttggagagcttaaaaatttaccgttattaaacacagataaaccggttcaagctttgatgaaaattgcggatgaattaggagaaatctttaaattcgaggcgcctggtcgtgtaacgcgctacttatcaagtcagcgtttaattaaagaagcatgcgatgaatcacgctttgataaaaacttaagtcaagcgcttaaattttatcgtgattttgagggagacgggttagcgacaagctggacgcatgaaaaaaattggaaaaaagcgcataatatcttacttccaagcttcagtcagcaggcaatgaaaggctatcatgcgatgatggtcgatatcgccgtgcagcttgttcaaaagtgggagcgtctaaatgcagatgagcatattgaagtaccggaagacatgacacgtttaacgcttgatacaattggtctttgcggctttaactatcgctttaacagcttttaccgagatcagcctcatccatttattacaagtatggtccgtgcactggatgaagcaatgaacaagctgcagcgagcaaatccagacgacccagcttatgatgaaaacaagcgccagtttcaagaagatatcaaggtgatgaacgacctagtagataaaattattgcagatcgcaaagctagcggtgaacaaagcgatgatttattaacgcatatgctaaacggaaaagatccagaaacgggtgagccgcttgatgacgagaacattcgctatcaaattattacattcttaattgcgggacacgaaacaacaagtggtcttttatcatttgcgctgtatttcttagtgaaaaatccacatgtattacaaaaagcagcagaagaagcagcacgagttctagtagatcctgttccaagctacaaacaagtcaaacagcttaaatatgtcggcatggtcttaaacgaagcgctgcgcttatggccaactgctcctgcgttttccctatatgcaaaagaagatacggtgcttggaggagaatatcctttagaaaaaggcgacgaactaatggttctgattcctcagcttcaccgtgataaaacaatttggggagacgatgtggaagagttccgtccagagcgttttgaaaatccaagtgcgattccgcagcatgcgtttaaaccgtttggaaacggtcagcgtgcgtgtatcggtcagcagttcgctcttcatgaagcaacgctggtacttggtatgatgctaaaacactttgactttgaagatcatacaaactacgagctggatattaaagaaactttaacgttaaaacctgaaggctttgtggtaaaagcaaaatcgaaaaaaattccgcttggcggtattccttcacctagcactgaacagtctgctaaaaaagtacgcaaaaaggcagaaaacgctcataatacgccgctgcttgtgctatacggttcaaatatgggaacagctgaaggaacggcgcgtgatttagcagatattgcaatgagcaaaggatttgcaccgcaggtcgcaacgcttgattcacacgccggaaatcttccgcgcgaaggagctgtattaattgtaacggcgtcttataacggtcatccgcctgataacgcaaagcaatttgtcgactggttagaccaagcgtctgctgatgaagtaaaaggcgttcgctactccgtatttggatgcggcgataaaaactgggctactacgtatcaaaaagtgcctgcttttatcgatgaaacgcttgccgctaaaggggcagaaaacatcgctgaccgcggtgaagcagatgcaagcgacgactttgaaggcacatatgaagaatggcgtgaacatatgtggagtgacgtagcagcctactttaacctcgacattgaaaacagtgaagataataaatctactctttcacttcaatttgtcgacagcgccgcggatatgccgcttgcgaaaatgcacggtgcgttttcaacgaacgtcgtagcaagcaaagaacttcaacagccaggcagtgcacgaagcacgcgacatcttgaaattgaacttccaaaagaagcttcttatcaagaaggagatcatttaggtgttattcctcgcaactatgaaggaatagtaaaccgtgtaacagcaaggttcggcctagatgcatcacagcaaatccgtctggaagcagaagaagaaaaattagctcatttgccactcgctaaaacagtatccgtagaagagcttctgcaatacgtggagcttcaagatcctgttacgcgcacgcagcttcgcgcaatggctgctaaaacggtctgcccgccgcataaagtagagcttgaagccttgcttgaaaagcaagcctacaaagaacaagtgctggcaaaacgtttaacaatgcttgaactgcttgaaaaatacccggcgtgtgaaatgaaattcagcgaatttatcgcccttctgccaagcatacgcccgcgctattactcgatttcttcatcacctcgtgtcgatgaaaaacaagcaagcatcacggtcagcgttgtctcaggagaagcgtggagcggatatggagaatataaaggaattgcgtcgaactatcttgccgagctgcaagaaggagatacgattacgtgctttatttccacaccgcagtcagaatttacgctgccaaaagaccctgaaacgccgcttatcatggtcggaccgggaacaggcgtcgcgccgtttagaggctttgtgcaggcgcgcaaacagctaaaagaacaaggacagtcacttggagaagcacatttatacttcggctgccgttcacctcatgaagactatctgtatcaagaagagcttgaaaacgcccaaagcgaaggcatcattacgcttcataccgctttttctcgcatgccaaatcagccgaaaacatacgttcagcacgtaatggaacaagacggcaagaaattgattgaacttcttgatcaaggagcgcacttctatatttgcggagacggaagccaaatggcacctgccgttgaagcaacgcttatgaaaagctatgctgacgttcaccaagtgagtgaagcagacgctcgcttatggctgcagcagctagaagaaaaaggccgatacgcaaaagacgtgtgggctgggtaa

SEQ ID NO: 61 - DNA, 3228 bp, Artificial Sequence
  BM3-263 (V78M, A82E, F87A)
atgaaacatcaccatcaccatcaccccatgagcgattacgacatccccactactgagaatctttattttcagggcgccatggcaattaaagaaatgcctcagccaaaaacgtttggagagcttaaaaatttaccgttattaaacacagataaaccggttcaagctttgatgaaaattgcggatgaattaggagaaatctttaaattcgaggcgcctggtcgtgtaacgcgctacttatcaagtcagcgtttaattaaagaagcatgcgatgaatcacgctttgataaaaacttaagtcaagcgcttaaatttatgcgtgattttgagggagacgggttagcgacaagctggacgcatgaaaaaaattggaaaaaagcgcataatatcttacttccaagcttcagtcagcaggcaatgaaaggctatcatgcgatgatggtcgatatcgccgtgcagcttgttcaaaagtgggagcgtctaaatgcagatgagcatattgaagtaccggaagacatgacacgtttaacgcttgatacaattggtctttgcggctttaactatcgctttaacagcttttaccgagatcagcctcatccatttattacaagtatggtccgtgcactggatgaagcaatgaacaagctgcagcgagcaaatccagacgacccagcttatgatgaaaacaagcgccagtttcaagaagatatcaaggtgatgaacgacctagtagataaaattattgcagatcgcaaagctagcggtgaacaaagcgatgatttattaacgcatatgctaaacggaaaagatccagaaacgggtgagccgcttgatgacgagaacattcgctatcaaattattacattcttaattgcgggacacgaaacaacaagtggtcttttatcatttgcgctgtatttcttagtgaaaaatccacatgtattacaaaaagcagcagaagaagcagcacgagttctagtagatcctgttccaagctacaaacaagtcaaacagcttaaatatgtcggcatggtcttaaacgaagcgctgcgcttatggccaactgctcctgcgttttccctatatgcaaaagaagatacggtgcttggaggagaatatcctttagaaaaaggcgacgaactaatggttctgattcctcagcttcaccgtgataaaacaatttggggagacgatgtggaagagttccgtccagagcgttttgaaaatccaagtgcgattccgcagcatgcgtttaaaccgtttggaaacggtcagcgtgcgtgtatcggtcagcagttcgctcttcatgaagcaacgctggtacttggtatgatgctaaaacactttgactttgaagatcatacaaactacgagctggatattaaagaaactttaacgttaaaacctgaaggctttgtggtaaaagcaaaatcgaaaaaaattccgcttggcggtattccttcacctagcactgaacagtctgctaaaaaagtacgcaaaaaggcagaaaacgctcataatacgccgctgcttgtgctatacggttcaaatatgggaacagctgaaggaacggcgcgtgatttagcagatattgcaatgagcaaaggatttgcaccgcaggtcgcaacgcttgattcacacgccggaaatcttccgcgcgaaggagctgtattaattgtaacggcgtcttataacggtcatccgcctgataacgcaaagcaatttgtcgactggttagaccaagcgtctgctgatgaagtaaaaggcgttcgctactccgtatttggatgcggcgataaaaactgggctactacgtatcaaaaagtgcctgcttttatcgatgaaacgcttgccgctaaaggggcagaaaacatcgctgaccgcggtgaagcagatgcaagcgacgactttgaaggcacatatgaagaatggcgtgaacatatgtggagtgacgtagcagcctactttaacctcgacattgaaaacagtgaagataataaatctactctttcacttcaatttgtcgacagcgccgcggatatgccgcttgcgaaaatgcacggtgcgttttcaacgaacgtcgtagcaagcaaagaacttcaacagccaggcagtgcacgaagcacgcgacatcttgaaattgaacttccaaaagaagcttcttatcaagaaggagatcatttaggtgttattcctcgcaactatgaaggaatagtaaaccgtgtaacagcaaggttcggcctagatgcatcacagcaaatccgtctggaagcagaagaagaaaaattagctcatttgccactcgctaaaacagtatccgtagaagagcttctgcaatacgtggagcttcaagatcctgttacgcgcacgcagcttcgcgcaatggctgctaaaacggtctgcccgccgcataaagtagagcttgaagccttgcttgaaaagcaagcctacaaagaacaagtgctggcaaaacgtttaacaatgcttgaactgcttgaaaaatacccggcgtgtgaaatgaaattcagcgaatttatcgcccttctgccaagcatacgcccgcgctattactcgatttcttcatcacctcgtgtcgatgaaaaacaagcaagcatcacggtcagcgttgtctcaggagaagcgtggagcggatatggagaatataaaggaattgcgtcgaactatcttgccgagctgcaagaaggagatacgattacgtgctttatttccacaccgcagtcagaatttacgctgccaaaagaccctgaaacgccgcttatcatggtcggaccgggaacaggcgtcgcgccgtttagaggctttgtgcaggcgcgcaaacagctaaaagaacaaggacagtcacttggagaagcacatttatacttcggctgccgttcacctcatgaagactatctgtatcaagaagagcttgaaaacgcccaaagcgaaggcatcattacgcttcataccgctttttctcgcatgccaaatcagccgaaaacatacgttcagcacgtaatggaacaagacggcaagaaattgattgaacttcttgatcaaggagcgcacttctatatttgcggagacggaagccaaatggcacctgccgttgaagcaacgcttatgaaaagctatgctgacgttcaccaagtgagtgaagcagacgctcgcttatggctgcagcagctagaagaaaaaggccgatacgcaaaagacgtgtgggctgggtaa

SEQ ID NO: 62 - DNA, 3228 bp, Artificial Sequence
  BM3-268 (V78I, A82E, F87A)
atgaaacatcaccatcaccatcaccccatgagcgattacgacatccccactactgagaatctttattttcagggcgccatggcaattaaagaaatgcctcagccaaaaacgtttggagagcttaaaaatttaccgttattaaacacagataaaccggttcaagctttgatgaaaattgcggatgaattaggagaaatctttaaattcgaggcgcctggtcgtgtaacgcgctacttatcaagtcagcgtctaattaaagaagcatgcgatgaatcacgctttgataaaaacttaagtcaagcgcttaaatttattcgtgattttgagggagacgggttagcaacaagctggacgcatgaaaaaaattggaaaaaagcgcataatatcttacttccaagcttcagtcagcaggcaatgaaaggctatcatgcgatgatggtcgatatcgccgtgcagcttgttcaaaagtgggagcgtctaaatgcagatgagcatattgaagtaccggaagacatgacacgtttaacgcttgatacaattggtctttgcggctttaactatcgctttaacagcttttaccgagatcagcctcatccatttattacaagtatggtccgtgcactggatgaagcaatgaacaagctgcagcgagcaaatccagacgacccagcttatgatgaaaacaagcgccagtttcaagaagatatcaaggtgatgaacgacctagtagataaaattattgcagatcgcaaagcaagcggtgaacaaagcgatgatttattaacgcatatgctaaacggaaaagatccagaaacgggtgagccgcttgatgacgagaacattcgctatcaaattattacattcttaattgcgggacacgaaacaacaagtggtcttttatcatttgcgctgtatttcttagtgaaaaatccacatgtattacaaaaagcagcagaagaagcagcacgagttctagtagatcctgttccaagctacaaacaagtcaaacagcttaaatatgtcggcatggtcttaaacgaagcgctgcgcttatggccaactgctcctgcgttttccctatatgcaaaagaagatacggtgcttggaggagaatatcctttagaaaaaggcgacgaactaatggttctgattcctcagcttcaccgtgataaaacaatttggggagacgatgtggaagagttccgtccagagcgttttgaaaatccaagtgcgattccgcagcatgcgtttaaaccgtttggaaacggtcagcgtgcgtgtatcggtcagcagttcgctcttcatgaagcaacgctggtacttggtatgatgctaaaacactttgactttgaagatcatacaaactacgagctggatattaaagaaactttaacgttaaaacctgaaggctttgtggtaaaagcaaaatcgaaaaaaattccgcttggcggtattccttcacctagcactgaacagtctgctaaaaaagtacgcaaaaaggcagaaaacgctcataatacgccgctgcttgtgctatacggttcaaatatgggaacagctgaaggaacggcgcgtgatttagcagatattgcaatgagcaaaggatttgcaccgcaggtcgcaacgcttgattcacacgccggaaatcttccgcgcgaaggagctgtattaattgtaacggcgtcttataacggtcatccgcctgataacgcaaagcaatttgtcgactggttagaccaagcgtctgctgatgaagtaaaaggcgttcgctactccgtatttggatgcggcgataaaaactgggctactacgtatcaaaaagtgcctgcttttatcgatgaaacgcttgccgctaaaggggcagaaaacatcgctgaccgcggtgaagcagatgcaagcgacgactttgaaggcacatatgaagaatggcgtgaacatatgtggagtgacgtagcagcctactttaacctcgacattgaaaacagtgaagataataaatctactctttcacttcaatttgtcgacagcgccgcggatatgccgcttgcgaaaatgcacggtgcgttttcaacgaacgtcgtagcaagcaaagaacttcaacagccaggcagtgcacgaagcacgcgacatcttgaaattgaacttccaaaagaagcttcttatcaagaaggagatcatttaggtgttattcctcgcaactatgaaggaatagtaaaccgtgtaacagcaaggttcggcctagatgcatcacagcaaatccgtctggaagcagaagaagaaaaattagctcatttgccactcgctaaaacagtatccgtagaagagcttctgcaatacgtggagcttcaagatcctgttacgcgcacgcagcttcgcgcaatggctgctaaaacggtctgcccgccgcataaagtagagcttgaagccttgcttgaaaagcaagcctacaaagaacaagtgctggcaaaacgtttaacaatgcttgaactgcttgaaaaatacccggcgtgtgaaatgaaattcagcgaatttatcgcccttctgccaagcatacgcccgcgctattactcgatttcttcatcacctcgtgtcgatgaaaaacaagcaagcatcacggtcagcgttgtctcaggagaagcgtggagcggatatggagaatataaaggaattgcgtcgaactatcttgccgagctgcaagaaggagatacgattacgtgctttatttccacaccgcagtcagaatttacgctgccaaaagaccctgaaacgccgcttatcatggtcggaccgggaacaggcgtcgcgccgtttagaggctttgtgcaggcgcgcaaacagctaaaagaacaaggacagtcacttggagaagcacatttatacttcggctgccgttcacctcatgaagactatctgtatcaagaagagcttgaaaacgcccaaagcgaaggcatcattacgcttcataccgctttttctcgcatgccaaatcagccgaaaacatacgttcagcacgtaatggaacaagacggcaagaaattgattgaacttcttgatcaaggagcgcacttctatatttgcggagacggaagccaaatggcacctgccgttgaagcaacgcttatgaaaagctatgctgacgttcaccaagtgagtgaagcagacgctcgcttatggctgcagcagctagaagaaaaaggccgatacgcaaaagacgtgtgggctgggtaa

SEQ ID NO: 63 - DNA, 3228 bp, Artificial Sequence
  BM3 variant (V78L, A82E, F87A)
atgaaacatcaccatcaccatcaccccatgagcgattacgacatccccactactgagaatctttattttcagggcgccatggcaattaaagaaatgcctcagccaaaaacgtttggagagcttaaaaatttaccgttattaaacacagataaaccggttcaagctttgatgaaaattgcggatgaattaggagaaatctttaaattcgaggcgcctggtcgtgtaacgcgctacttatcaagtcagcgtctaattaaagaagcatgcgatgaatcacgctttgataaaaacttaagtcaagcgcttaaatttctgcgtgattttgagggagacgggttagcaacaagctggacgcatgaaaaaaattggaaaaaagcgcataatatcttacttccaagcttcagtcagcaggcaatgaaaggctatcatgcgatgatggtcgatatcgccgtgcagcttgttcaaaagtgggagcgtctaaatgcagatgagcatattgaagtaccggaagacatgacacgtttaacgcttgatacaattggtctttgcggctttaactatcgctttaacagcttttaccgagatcagcctcatccatttattacaagtatggtccgtgcactggatgaagcaatgaacaagctgcagcgagcaaatccagacgacccagcttatgatgaaaacaagcgccagtttcaagaagatatcaaggtgatgaacgacctagtagataaaattattgcagatcgcaaagcaagcggtgaacaaagcgatgatttattaacgcatatgctaaacggaaaagatccagaaacgggtgagccgcttgatgacgagaacattcgctatcaaattattacattcttaattgcgggacacgaaacaacaagtggtcttttatcatttgcgctgtatttcttagtgaaaaatccacatgtattacaaaaagcagcagaagaagcagcacgagttctagtagatcctgttccaagctacaaacaagtcaaacagcttaaatatgtcggcatggtcttaaacgaagcgctgcgcttatggccaactgctcctgcgttttccctatatgcaaaagaagatacggtgcttggaggagaatatcctttagaaaaaggcgacgaactaatggttctgattcctcagcttcaccgtgataaaacaatttggggagacgatgtggaagagttccgtccagagcgttttgaaaatccaagtgcgattccgcagcatgcgtttaaaccgtttggaaacggtcagcgtgcgtgtatcggtcagcagttcgctcttcatgaagcaacgctggtacttggtatgatgctaaaacactttgactttgaagatcatacaaactacgagctggatattaaagaaactttaacgttaaaacctgaaggctttgtggtaaaagcaaaatcgaaaaaaattccgcttggcggtattccttcacctagcactgaacagtctgctaaaaaagtacgcaaaaaggcagaaaacgctcataatacgccgctgcttgtgctatacggttcaaatatgggaacagctgaaggaacggcgcgtgatttagcagatattgcaatgagcaaaggatttgcaccgcaggtcgcaacgcttgattcacacgccggaaatcttccgcgcgaaggagctgtattaattgtaacggcgtcttataacggtcatccgcctgataacgcaaagcaatttgtcgactggttagaccaagcgtctgctgatgaagtaaaaggcgttcgctactccgtatttggatgcggcgataaaaactgggctactacgtatcaaaaagtgcctgcttttatcgatgaaacgcttgccgctaaaggggcagaaaacatcgctgaccgcggtgaagcagatgcaagcgacgactttgaaggcacatatgaagaatggcgtgaacatatgtggagtgacgtagcagcctactttaacctcgacattgaaaacagtgaagataataaatctactctttcacttcaatttgtcgacagcgccgcggatatgccgcttgcgaaaatgcacggtgcgttttcaacgaacgtcgtagcaagcaaagaacttcaacagccaggcagtgcacgaagcacgcgacatcttgaaattgaacttccaaaagaagcttcttatcaagaaggagatcatttaggtgttattcctcgcaactatgaaggaatagtaaaccgtgtaacagcaaggttcggcctagatgcatcacagcaaatccgtctggaagcagaagaagaaaaattagctcatttgccactcgctaaaacagtatccgtagaagagcttctgcaatacgtggagcttcaagatcctgttacgcgcacgcagcttcgcgcaatggctgctaaaacggtctgcccgccgcataaagtagagcttgaagccttgcttgaaaagcaagcctacaaagaacaagtgctggcaaaacgtttaacaatgcttgaactgcttgaaaaatacccggcgtgtgaaatgaaattcagcgaatttatcgcccttctgccaagcatacgcccgcgctattactcgatttcttcatcacctcgtgtcgatgaaaaacaagcaagcatcacggtcagcgttgtctcaggagaagcgtggagcggatatggagaatataaaggaattgcgtcgaactatcttgccgagctgcaagaaggagatacgattacgtgctttatttccacaccgcagtcagaatttacgctgccaaaagaccctgaaacgccgcttatcatggtcggaccgggaacaggcgtcgcgccgtttagaggctttgtgcaggcgcgcaaacagctaaaagaacaaggacagtcacttggagaagcacatttatacttcggctgccgttcacctcatgaagactatctgtatcaagaagagcttgaaaacgcccaaagcgaaggcatcattacgcttcataccgctttttctcgcatgccaaatcagccgaaaacatacgttcagcacgtaatggaacaagacggcaagaaattgattgaacttcttgatcaaggagcgcacttctatatttgcggagacggaagccaaatggcacctgccgttgaagcaacgcttatgaaaagctatgctgacgttcaccaagtgagtgaagcagacgctcgcttatggctgcagcagctagaagaaaaaggccgatacgcaaaagacgtgtgggctgggtaa

SEQ ID NO: 64 - DNA, 3228 bp, Artificial Sequence
  BM3 variant (V78Y, A82P, F87A)
atgaaacatcaccatcaccatcaccccatgagcgattacgacatccccactactgagaatctttattttcagggcgccatggcaattaaagaaatgcctcagccaaaaacgtttggagagcttaaaaatttaccgttattaaacacagataaaccggttcaagctttgatgaaaattgcggatgaattaggagaaatctttaaattcgaggcgcctggtcgtgtaacgcgctacttatcaagtcagcgtctaattaaagaagcatgcgatgaatcacgctttgataaaaacttaagtcaagcgcttaaattttatcgtgattttcctggagacgggttagcaacaagctggacgcatgaaaaaaattggaaaaaagcgcataatatcttacttccaagcttcagtcagcaggcaatgaaaggctatcatgcgatgatggtcgatatcgccgtgcagcttgttcaaaagtgggagcgtctaaatgcagatgagcatattgaagtaccggaagacatgacacgtttaacgcttgatacaattggtctttgcggctttaactatcgctttaacagcttttaccgagatcagcctcatccatttattacaagtatggtccgtgcactggatgaagcaatgaacaagctgcagcgagcaaatccagacgacccagcttatgatgaaaacaagcgccagtttcaagaagatatcaaggtgatgaacgacctagtagataaaattattgcagatcgcaaagcaagcggtgaacaaagcgatgatttattaacgcatatgctaaacggaaaagatccagaaacgggtgagccgcttgatgacgagaacattcgctatcaaattattacattcttaattgcgggacacgaaacaacaagtggtcttttatcatttgcgctgtatttcttagtgaaaaatccacatgtattacaaaaagcagcagaagaagcagcacgagttctagtagatcctgttccaagctacaaacaagtcaaacagcttaaatatgtcggcatggtcttaaacgaagcgctgcgcttatggccaactgctcctgcgttttccctatatgcaaaagaagatacggtgcttggaggagaatatcctttagaaaaaggcgacgaactaatggttctgattcctcagcttcaccgtgataaaacaatttggggagacgatgtggaagagttccgtccagagcgttttgaaaatccaagtgcgattccgcagcatgcgtttaaaccgtttggaaacggtcagcgtgcgtgtatcggtcagcagttcgctcttcatgaagcaacgctggtacttggtatgatgctaaaacactttgactttgaagatcatacaaactacgagctggatattaaagaaactttaacgttaaaacctgaaggctttgtggtaaaagcaaaatcgaaaaaaattccgcttggcggtattccttcacctagcactgaacagtctgctaaaaaagtacgcaaaaaggcagaaaacgctcataatacgccgctgcttgtgctatacggttcaaatatgggaacagctgaaggaacggcgcgtgatttagcagatattgcaatgagcaaaggatttgcaccgcaggtcgcaacgcttgattcacacgccggaaatcttccgcgcgaaggagctgtattaattgtaacggcgtcttataacggtcatccgcctgataacgcaaagcaatttgtcgactggttagaccaagcgtctgctgatgaagtaaaaggcgttcgctactccgtatttggatgcggcgataaaaactgggctactacgtatcaaaaagtgcctgcttttatcgatgaaacgcttgccgctaaaggggcagaaaacatcgctgaccgcggtgaagcagatgcaagcgacgactttgaaggcacatatgaagaatggcgtgaacatatgtggagtgacgtagcagcctactttaacctcgacattgaaaacagtgaagataataaatctactctttcacttcaatttgtcgacagcgccgcggatatgccgcttgcgaaaatgcacggtgcgttttcaacgaacgtcgtagcaagcaaagaacttcaacagccaggcagtgcacgaagcacgcgacatcttgaaattgaacttccaaaagaagcttcttatcaagaaggagatcatttaggtgttattcctcgcaactatgaaggaatagtaaaccgtgtaacagcaaggttcggcctagatgcatcacagcaaatccgtctggaagcagaagaagaaaaattagctcatttgccactcgctaaaacagtatccgtagaagagcttctgcaatacgtggagcttcaagatcctgttacgcgcacgcagcttcgcgcaatggctgctaaaacggtctgcccgccgcataaagtagagcttgaagccttgcttgaaaagcaagcctacaaagaacaagtgctggcaaaacgtttaacaatgcttgaactgcttgaaaaatacccggcgtgtgaaatgaaattcagcgaatttatcgcccttctgccaagcatacgcccgcgctattactcgatttcttcatcacctcgtgtcgatgaaaaacaagcaagcatcacggtcagcgttgtctcaggagaagcgtggagcggatatggagaatataaaggaattgcgtcgaactatcttgccgagctgcaagaaggagatacgattacgtgctttatttccacaccgcagtcagaatttacgctgccaaaagaccctgaaacgccgcttatcatggtcggaccgggaacaggcgtcgcgccgtttagaggctttgtgcaggcgcgcaaacagctaaaagaacaaggacagtcacttggagaagcacatttatacttcggctgccgttcacctcatgaagactatctgtatcaagaagagcttgaaaacgcccaaagcgaaggcatcattacgcttcataccgctttttctcgcatgccaaatcagccgaaaacatacgttcagcacgtaatggaacaagacggcaagaaattgattgaacttcttgatcaaggagcgcacttctatatttgcggagacggaagccaaatggcacctgccgttgaagcaacgcttatgaaaagctatgctgacgttcaccaagtgagtgaagcagacgctcgcttatggctgcagcagctagaagaaaaaggccgatacgcaaaagacgtgtgggctgggtaa

SEQ ID NO: 65 - DNA, 3228 bp, Artificial Sequence
  BM3 variant (V78M, A82P, F87A)
atgaaacatcaccatcaccatcaccccatgagcgattacgacatccccactactgagaatctttattttcagggcgccatggcaattaaagaaatgcctcagccaaaaacgtttggagagcttaaaaatttaccgttattaaacacagataaaccggttcaagctttgatgaaaattgcggatgaattaggagaaatctttaaattcgaggcgcctggtcgtgtaacgcgctacttatcaagtcagcgtctaattaaagaagcatgcgatgaatcacgctttgataaaaacttaagtcaagcgcttaaatttatgcgtgattttcctggagacgggttagcaacaagctggacgcatgaaaaaaattggaaaaaagcgcataatatcttacttccaagcttcagtcagcaggcaatgaaaggctatcatgcgatgatggtcgatatcgccgtgcagcttgttcaaaagtgggagcgtctaaatgcagatgagcatattgaagtaccggaagacatgacacgtttaacgcttgatacaattggtctttgcggctttaactatcgctttaacagcttttaccgagatcagcctcatccatttattacaagtatggtccgtgcactggatgaagcaatgaacaagctgcagcgagcaaatccagacgacccagcttatgatgaaaacaagcgccagtttcaagaagatatcaaggtgatgaacgacctagtagataaaattattgcagatcgcaaagcaagcggtgaacaaagcgatgatttattaacgcatatgctaaacggaaaagatccagaaacgggtgagccgcttgatgacgagaacattcgctatcaaattattacattcttaattgcgggacacgaaacaacaagtggtcttttatcatttgcgctgtatttcttagtgaaaaatccacatgtattacaaaaagcagcagaagaagcagcacgagttctagtagatcctgttccaagctacaaacaagtcaaacagcttaaatatgtcggcatggtcttaaacgaagcgctgcgcttatggccaactgctcctgcgttttccctatatgcaaaagaagatacggtgcttggaggagaatatcctttagaaaaaggcgacgaactaatggttctgattcctcagcttcaccgtgataaaacaatttggggagacgatgtggaagagttccgtccagagcgttttgaaaatccaagtgcgattccgcagcatgcgtttaaaccgtttggaaacggtcagcgtgcgtgtatcggtcagcagttcgctcttcatgaagcaacgctggtacttggtatgatgctaaaacactttgactttgaagatcatacaaactacgagctggatattaaagaaactttaacgttaaaacctgaaggctttgtggtaaaagcaaaatcgaaaaaaattccgcttggcggtattccttcacctagcactgaacagtctgctaaaaaagtacgcaaaaaggcagaaaacgctcataatacgccgctgcttgtgctatacggttcaaatatgggaacagctgaaggaacggcgcgtgatttagcagatattgcaatgagcaaaggatttgcaccgcaggtcgcaacgcttgattcacacgccggaaatcttccgcgcgaaggagctgtattaattgtaacggcgtcttataacggtcatccgcctgataacgcaaagcaatttgtcgactggttagaccaagcgtctgctgatgaagtaaaaggcgttcgctactccgtatttggatgcggcgataaaaactgggctactacgtatcaaaaagtgcctgcttttatcgatgaaacgcttgccgctaaaggggcagaaaacatcgctgaccgcggtgaagcagatgcaagcgacgactttgaaggcacatatgaagaatggcgtgaacatatgtggagtgacgtagcagcctactttaacctcgacattgaaaacagtgaagataataaatctactctttcacttcaatttgtcgacagcgccgcggatatgccgcttgcgaaaatgcacggtgcgttttcaacgaacgtcgtagcaagcaaagaacttcaacagccaggcagtgcacgaagcacgcgacatcttgaaattgaacttccaaaagaagcttcttatcaagaaggagatcatttaggtgttattcctcgcaactatgaaggaatagtaaaccgtgtaacagcaaggttcggcctagatgcatcacagcaaatccgtctggaagcagaagaagaaaaattagctcatttgccactcgctaaaacagtatccgtagaagagcttctgcaatacgtggagcttcaagatcctgttacgcgcacgcagcttcgcgcaatggctgctaaaacggtctgcccgccgcataaagtagagcttgaagccttgcttgaaaagcaagcctacaaagaacaagtgctggcaaaacgtttaacaatgcttgaactgcttgaaaaatacccggcgtgtgaaatgaaattcagcgaatttatcgcccttctgccaagcatacgcccgcgctattactcgatttcttcatcacctcgtgtcgatgaaaaacaagcaagcatcacggtcagcgttgtctcaggagaagcgtggagcggatatggagaatataaaggaattgcgtcgaactatcttgccgagctgcaagaaggagatacgattacgtgctttatttccacaccgcagtcagaatttacgctgccaaaagaccctgaaacgccgcttatcatggtcggaccgggaacaggcgtcgcgccgtttagaggctttgtgcaggcgcgcaaacagctaaaagaacaaggacagtcacttggagaagcacatttatacttcggctgccgttcacctcatgaagactatctgtatcaagaagagcttgaaaacgcccaaagcgaaggcatcattacgcttcataccgctttttctcgcatgccaaatcagccgaaaacatacgttcagcacgtaatggaacaagacggcaagaaattgattgaacttcttgatcaaggagcgcacttctatatttgcggagacggaagccaaatggcacctgccgttgaagcaacgcttatgaaaagctatgctgacgttcaccaagtgagtgaagcagacgctcgcttatggctgcagcagctagaagaaaaaggccgatacgcaaaagacgtgtgggctgggtaa

SEQ ID NO: 66 - DNA, 3228 bp, Artificial Sequence
  BM3 variant (V78I, A82P, F87A)
atgaaacatcaccatcaccatcaccccatgagcgattacgacatccccactactgagaatctttattttcagggcgccatggcaattaaagaaatgcctcagccaaaaacgtttggagagcttaaaaatttaccgttattaaacacagataaaccggttcaagctttgatgaaaattgcggatgaattaggagaaatctttaaattcgaggcgcctggtcgtgtaacgcgctacttatcaagtcagcgtctaattaaagaagcatgcgatgaatcacgctttgataaaaacttaagtcaagcgcttaaatttattcgtgattttcctggagacgggttagcaacaagctggacgcatgaaaaaaattggaaaaaagcgcataatatcttacttccaagcttcagtcagcaggcaatgaaaggctatcatgcgatgatggtcgatatcgccgtgcagcttgttcaaaagtgggagcgtctaaatgcagatgagcatattgaagtaccggaagacatgacacgtttaacgcttgatacaattggtctttgcggctttaactatcgctttaacagcttttaccgagatcagcctcatccatttattacaagtatggtccgtgcactggatgaagcaatgaacaagctgcagcgagcaaatccagacgacccagcttatgatgaaaacaagcgccagtttcaagaagatatcaaggtgatgaacgacctagtagataaaattattgcagatcgcaaagcaagcggtgaacaaagcgatgatttattaacgcatatgctaaacggaaaagatccagaaacgggtgagccgcttgatgacgagaacattcgctatcaaattattacattcttaattgcgggacacgaaacaacaagtggtcttttatcatttgcgctgtatttcttagtgaaaaatccacatgtattacaaaaagcagcagaagaagcagcacgagttctagtagatcctgttccaagctacaaacaagtcaaacagcttaaatatgtcggcatggtcttaaacgaagcgctgcgcttatggccaactgctcctgcgttttccctatatgcaaaagaagatacggtgcttggaggagaatatcctttagaaaaaggcgacgaactaatggttctgattcctcagcttcaccgtgataaaacaatttggggagacgatgtggaagagttccgtccagagcgttttgaaaatccaagtgcgattccgcagcatgcgtttaaaccgtttggaaacggtcagcgtgcgtgtatcggtcagcagttcgctcttcatgaagcaacgctggtacttggtatgatgctaaaacactttgactttgaagatcatacaaactacgagctggatattaaagaaactttaacgttaaaacctgaaggctttgtggtaaaagcaaaatcgaaaaaaattccgcttggcggtattccttcacctagcactgaacagtctgctaaaaaagtacgcaaaaaggcagaaaacgctcataatacgccgctgcttgtgctatacggttcaaatatgggaacagctgaaggaacggcgcgtgatttagcagatattgcaatgagcaaaggatttgcaccgcaggtcgcaacgcttgattcacacgccggaaatcttccgcgcgaaggagctgtattaattgtaacggcgtcttataacggtcatccgcctgataacgcaaagcaatttgtcgactggttagaccaagcgtctgctgatgaagtaaaaggcgttcgctactccgtatttggatgcggcgataaaaactgggctactacgtatcaaaaagtgcctgcttttatcgatgaaacgcttgccgctaaaggggcagaaaacatcgctgaccgcggtgaagcagatgcaagcgacgactttgaaggcacatatgaagaatggcgtgaacatatgtggagtgacgtagcagcctactttaacctcgacattgaaaacagtgaagataataaatctactctttcacttcaatttgtcgacagcgccgcggatatgccgcttgcgaaaatgcacggtgcgttttcaacgaacgtcgtagcaagcaaagaacttcaacagccaggcagtgcacgaagcacgcgacatcttgaaattgaacttccaaaagaagcttcttatcaagaaggagatcatttaggtgttattcctcgcaactatgaaggaatagtaaaccgtgtaacagcaaggttcggcctagatgcatcacagcaaatccgtctggaagcagaagaagaaaaattagctcatttgccactcgctaaaacagtatccgtagaagagcttctgcaatacgtggagcttcaagatcctgttacgcgcacgcagcttcgcgcaatggctgctaaaacggtctgcccgccgcataaagtagagcttgaagccttgcttgaaaagcaagcctacaaagaacaagtgctggcaaaacgtttaacaatgcttgaactgcttgaaaaatacccggcgtgtgaaatgaaattcagcgaatttatcgcccttctgccaagcatacgcccgcgctattactcgatttcttcatcacctcgtgtcgatgaaaaacaagcaagcatcacggtcagcgttgtctcaggagaagcgtggagcggatatggagaatataaaggaattgcgtcgaactatcttgccgagctgcaagaaggagatacgattacgtgctttatttccacaccgcagtcagaatttacgctgccaaaagaccctgaaacgccgcttatcatggtcggaccgggaacaggcgtcgcgccgtttagaggctttgtgcaggcgcgcaaacagctaaaagaacaaggacagtcacttggagaagcacatttatacttcggctgccgttcacctcatgaagactatctgtatcaagaagagcttgaaaacgcccaaagcgaaggcatcattacgcttcataccgctttttctcgcatgccaaatcagccgaaaacatacgttcagcacgtaatggaacaagacggcaagaaattgattgaacttcttgatcaaggagcgcacttctatatttgcggagacggaagccaaatggcacctgccgttgaagcaacgcttatgaaaagctatgctgacgttcaccaagtgagtgaagcagacgctcgcttatggctgcagcagctagaagaaaaaggccgatacgcaaaagacgtgtgggctgggtaa

SEQ ID NO: 67 - DNA, 3228 bp, Artificial Sequence
  BM3 variant (V78L, A82P, F87A)
atgaaacatcaccatcaccatcaccccatgagcgattacgacatccccactactgagaatctttattttcagggcgccatggcaattaaagaaatgcctcagccaaaaacgtttggagagcttaaaaatttaccgttattaaacacagataaaccggttcaagctttgatgaaaattgcggatgaattaggagaaatctttaaattcgaggcgcctggtcgtgtaacgcgctacttatcaagtcagcgtctaattaaagaagcatgcgatgaatcacgctttgataaaaacttaagtcaagcgcttaaatttctgcgtgattttcctggagacgggttagcaacaagctggacgcatgaaaaaaattggaaaaaagcgcataatatcttacttccaagcttcagtcagcaggcaatgaaaggctatcatgcgatgatggtcgatatcgccgtgcagcttgttcaaaagtgggagcgtctaaatgcagatgagcatattgaagtaccggaagacatgacacgtttaacgcttgatacaattggtctttgcggctttaactatcgctttaacagcttttaccgagatcagcctcatccatttattacaagtatggtccgtgcactggatgaagcaatgaacaagctgcagcgagcaaatccagacgacccagcttatgatgaaaacaagcgccagtttcaagaagatatcaaggtgatgaacgacctagtagataaaattattgcagatcgcaaagcaagcggtgaacaaagcgatgatttattaacgcatatgctaaacggaaaagatccagaaacgggtgagccgcttgatgacgagaacattcgctatcaaattattacattcttaattgcgggacacgaaacaacaagtggtcttttatcatttgcgctgtatttcttagtgaaaaatccacatgtattacaaaaagcagcagaagaagcagcacgagttctagtagatcctgttccaagctacaaacaagtcaaacagcttaaatatgtcggcatggtcttaaacgaagcgctgcgcttatggccaactgctcctgcgttttccctatatgcaaaagaagatacggtgcttggaggagaatatcctttagaaaaaggcgacgaactaatggttctgattcctcagcttcaccgtgataaaacaatttggggagacgatgtggaagagttccgtccagagcgttttgaaaatccaagtgcgattccgcagcatgcgtttaaaccgtttggaaacggtcagcgtgcgtgtatcggtcagcagttcgctcttcatgaagcaacgctggtacttggtatgatgctaaaacactttgactttgaagatcatacaaactacgagctggatattaaagaaactttaacgttaaaacctgaaggctttgtggtaaaagcaaaatcgaaaaaaattccgcttggcggtattccttcacctagcactgaacagtctgctaaaaaagtacgcaaaaaggcagaaaacgctcataatacgccgctgcttgtgctatacggttcaaatatgggaacagctgaaggaacggcgcgtgatttagcagatattgcaatgagcaaaggatttgcaccgcaggtcgcaacgcttgattcacacgccggaaatcttccgcgcgaaggagctgtattaattgtaacggcgtcttataacggtcatccgcctgataacgcaaagcaatttgtcgactggttagaccaagcgtctgctgatgaagtaaaaggcgttcgctactccgtatttggatgcggcgataaaaactgggctactacgtatcaaaaagtgcctgcttttatcgatgaaacgcttgccgctaaaggggcagaaaacatcgctgaccgcggtgaagcagatgcaagcgacgactttgaaggcacatatgaagaatggcgtgaacatatgtggagtgacgtagcagcctactttaacctcgacattgaaaacagtgaagataataaatctactctttcacttcaatttgtcgacagcgccgcggatatgccgcttgcgaaaatgcacggtgcgttttcaacgaacgtcgtagcaagcaaagaacttcaacagccaggcagtgcacgaagcacgcgacatcttgaaattgaacttccaaaagaagcttcttatcaagaaggagatcatttaggtgttattcctcgcaactatgaaggaatagtaaaccgtgtaacagcaaggttcggcctagatgcatcacagcaaatccgtctggaagcagaagaagaaaaattagctcatttgccactcgctaaaacagtatccgtagaagagcttctgcaatacgtggagcttcaagatcctgttacgcgcacgcagcttcgcgcaatggctgctaaaacggtctgcccgccgcataaagtagagcttgaagccttgcttgaaaagcaagcctacaaagaacaagtgctggcaaaacgtttaacaatgcttgaactgcttgaaaaatacccggcgtgtgaaatgaaattcagcgaatttatcgcccttctgccaagcatacgcccgcgctattactcgatttcttcatcacctcgtgtcgatgaaaaacaagcaagcatcacggtcagcgttgtctcaggagaagcgtggagcggatatggagaatataaaggaattgcgtcgaactatcttgccgagctgcaagaaggagatacgattacgtgctttatttccacaccgcagtcagaatttacgctgccaaaagaccctgaaacgccgcttatcatggtcggaccgggaacaggcgtcgcgccgtttagaggctttgtgcaggcgcgcaaacagctaaaagaacaaggacagtcacttggagaagcacatttatacttcggctgccgttcacctcatgaagactatctgtatcaagaagagcttgaaaacgcccaaagcgaaggcatcattacgcttcataccgctttttctcgcatgccaaatcagccgaaaacatacgttcagcacgtaatggaacaagacggcaagaaattgattgaacttcttgatcaaggagcgcacttctatatttgcggagacggaagccaaatggcacctgccgttgaagcaacgcttatgaaaagctatgctgacgttcaccaagtgagtgaagcagacgctcgcttatggctgcagcagctagaagaaaaaggccgatacgcaaaagacgtgtgggctgggtaa

SEQ ID NO: 68 - DNA, 3228 bp, Artificial Sequence
  BM3 variant (V78Y, A82Q, F87A)
atgaaacatcaccatcaccatcaccccatgagcgattacgacatccccactactgagaatctttattttcagggcgccatggcaattaaagaaatgcctcagccaaaaacgtttggagagcttaaaaatttaccgttattaaacacagataaaccggttcaagctttgatgaaaattgcggatgaattaggagaaatctttaaattcgaggcgcctggtcgtgtaacgcgctacttatcaagtcagcgtctaattaaagaagcatgcgatgaatcacgctttgataaaaacttaagtcaagcgcttaaattttatcgtgattttcagggagacgggttagcaacaagctggacgcatgaaaaaaattggaaaaaagcgcataatatcttacttccaagcttcagtcagcaggcaatgaaaggctatcatgcgatgatggtcgatatcgccgtgcagcttgttcaaaagtgggagcgtctaaatgcagatgagcatattgaagtaccggaagacatgacacgtttaacgcttgatacaattggtctttgcggctttaactatcgctttaacagcttttaccgagatcagcctcatccatttattacaagtatggtccgtgcactggatgaagcaatgaacaagctgcagcgagcaaatccagacgacccagcttatgatgaaaacaagcgccagtttcaagaagatatcaaggtgatgaacgacctagtagataaaattattgcagatcgcaaagcaagcggtgaacaaagcgatgatttattaacgcatatgctaaacggaaaagatccagaaacgggtgagccgcttgatgacgagaacattcgctatcaaattattacattcttaattgcgggacacgaaacaacaagtggtcttttatcatttgcgctgtatttcttagtgaaaaatccacatgtattacaaaaagcagcagaagaagcagcacgagttctagtagatcctgttccaagctacaaacaagtcaaacagcttaaatatgtcggcatggtcttaaacgaagcgctgcgcttatggccaactgctcctgcgttttccctatatgcaaaagaagatacggtgcttggaggagaatatcctttagaaaaaggcgacgaactaatggttctgattcctcagcttcaccgtgataaaacaatttggggagacgatgtggaagagttccgtccagagcgttttgaaaatccaagtgcgattccgcagcatgcgtttaaaccgtttggaaacggtcagcgtgcgtgtatcggtcagcagttcgctcttcatgaagcaacgctggtacttggtatgatgctaaaacactttgactttgaagatcatacaaactacgagctggatattaaagaaactttaacgttaaaacctgaaggctttgtggtaaaagcaaaatcgaaaaaaattccgcttggcggtattccttcacctagcactgaacagtctgctaaaaaagtacgcaaaaaggcagaaaacgctcataatacgccgctgcttgtgctatacggttcaaatatgggaacagctgaaggaacggcgcgtgatttagcagatattgcaatgagcaaaggatttgcaccgcaggtcgcaacgcttgattcacacgccggaaatcttccgcgcgaaggagctgtattaattgtaacggcgtcttataacggtcatccgcctgataacgcaaagcaatttgtcgactggttagaccaagcgtctgctgatgaagtaaaaggcgttcgctactccgtatttggatgcggcgataaaaactgggctactacgtatcaaaaagtgcctgcttttatcgatgaaacgcttgccgctaaaggggcagaaaacatcgctgaccgcggtgaagcagatgcaagcgacgactttgaaggcacatatgaagaatggcgtgaacatatgtggagtgacgtagcagcctactttaacctcgacattgaaaacagtgaagataataaatctactctttcacttcaatttgtcgacagcgccgcggatatgccgcttgcgaaaatgcacggtgcgttttcaacgaacgtcgtagcaagcaaagaacttcaacagccaggcagtgcacgaagcacgcgacatcttgaaattgaacttccaaaagaagcttcttatcaagaaggagatcatttaggtgttattcctcgcaactatgaaggaatagtaaaccgtgtaacagcaaggttcggcctagatgcatcacagcaaatccgtctggaagcagaagaagaaaaattagctcatttgccactcgctaaaacagtatccgtagaagagcttctgcaatacgtggagcttcaagatcctgttacgcgcacgcagcttcgcgcaatggctgctaaaacggtctgcccgccgcataaagtagagcttgaagccttgcttgaaaagcaagcctacaaagaacaagtgctggcaaaacgtttaacaatgcttgaactgcttgaaaaatacccggcgtgtgaaatgaaattcagcgaatttatcgcccttctgccaagcatacgcccgcgctattactcgatttcttcatcacctcgtgtcgatgaaaaacaagcaagcatcacggtcagcgttgtctcaggagaagcgtggagcggatatggagaatataaaggaattgcgtcgaactatcttgccgagctgcaagaaggagatacgattacgtgctttatttccacaccgcagtcagaatttacgctgccaaaagaccctgaaacgccgcttatcatggtcggaccgggaacaggcgtcgcgccgtttagaggctttgtgcaggcgcgcaaacagctaaaagaacaaggacagtcacttggagaagcacatttatacttcggctgccgttcacctcatgaagactatctgtatcaagaagagcttgaaaacgcccaaagcgaaggcatcattacgcttcataccgctttttctcgcatgccaaatcagccgaaaacatacgttcagcacgtaatggaacaagacggcaagaaattgattgaacttcttgatcaaggagcgcacttctatatttgcggagacggaagccaaatggcacctgccgttgaagcaacgcttatgaaaagctatgctgacgttcaccaagtgagtgaagcagacgctcgcttatggctgcagcagctagaagaaaaaggccgatacgcaaaagacgtgtgggctgggtaa

SEQ ID NO: 69 - DNA, 3228 bp, Artificial Sequence
  BM3 variant (V78M, A82Q, F87A)
atgaaacatcaccatcaccatcaccccatgagcgattacgacatccccactactgagaatctttattttcagggcgccatggcaattaaagaaatgcctcagccaaaaacgtttggagagcttaaaaatttaccgttattaaacacagataaaccggttcaagctttgatgaaaattgcggatgaattaggagaaatctttaaattcgaggcgcctggtcgtgtaacgcgctacttatcaagtcagcgtctaattaaagaagcatgcgatgaatcacgctttgataaaaacttaagtcaagcgcttaaatttatgcgtgattttcagggagacgggttagcaacaagctggacgcatgaaaaaaattggaaaaaagcgcataatatcttacttccaagcttcagtcagcaggcaatgaaaggctatcatgcgatgatggtcgatatcgccgtgcagcttgttcaaaagtgggagcgtctaaatgcagatgagcatattgaagtaccggaagacatgacacgtttaacgcttgatacaattggtctttgcggctttaactatcgctttaacagcttttaccgagatcagcctcatccatttattacaagtatggtccgtgcactggatgaagcaatgaacaagctgcagcgagcaaatccagacgacccagcttatgatgaaaacaagcgccagtttcaagaagatatcaaggtgatgaacgacctagtagataaaattattgcagatcgcaaagcaagcggtgaacaaagcgatgatttattaacgcatatgctaaacggaaaagatccagaaacgggtgagccgcttgatgacgagaacattcgctatcaaattattacattcttaattgcgggacacgaaacaacaagtggtcttttatcatttgcgctgtatttcttagtgaaaaatccacatgtattacaaaaagcagcagaagaagcagcacgagttctagtagatcctgttccaagctacaaacaagtcaaacagcttaaatatgtcggcatggtcttaaacgaagcgctgcgcttatggccaactgctcctgcgttttccctatatgcaaaagaagatacggtgcttggaggagaatatcctttagaaaaaggcgacgaactaatggttctgattcctcagcttcaccgtgataaaacaatttggggagacgatgtggaagagttccgtccagagcgttttgaaaatccaagtgcgattccgcagcatgcgtttaaaccgtttggaaacggtcagcgtgcgtgtatcggtcagcagttcgctcttcatgaagcaacgctggtacttggtatgatgctaaaacactttgactttgaagatcatacaaactacgagctggatattaaagaaactttaacgttaaaacctgaaggctttgtggtaaaagcaaaatcgaaaaaaattccgcttggcggtattccttcacctagcactgaacagtctgctaaaaaagtacgcaaaaaggcagaaaacgctcataatacgccgctgcttgtgctatacggttcaaatatgggaacagctgaaggaacggcgcgtgatttagcagatattgcaatgagcaaaggatttgcaccgcaggtcgcaacgcttgattcacacgccggaaatcttccgcgcgaaggagctgtattaattgtaacggcgtcttataacggtcatccgcctgataacgcaaagcaatttgtcgactggttagaccaagcgtctgctgatgaagtaaaaggcgttcgctactccgtatttggatgcggcgataaaaactgggctactacgtatcaaaaagtgcctgcttttatcgatgaaacgcttgccgctaaaggggcagaaaacatcgctgaccgcggtgaagcagatgcaagcgacgactttgaaggcacatatgaagaatggcgtgaacatatgtggagtgacgtagcagcctactttaacctcgacattgaaaacagtgaagataataaatctactctttcacttcaatttgtcgacagcgccgcggatatgccgcttgcgaaaatgcacggtgcgttttcaacgaacgtcgtagcaagcaaagaacttcaacagccaggcagtgcacgaagcacgcgacatcttgaaattgaacttccaaaagaagcttcttatcaagaaggagatcatttaggtgttattcctcgcaactatgaaggaatagtaaaccgtgtaacagcaaggttcggcctagatgcatcacagcaaatccgtctggaagcagaagaagaaaaattagctcatttgccactcgctaaaacagtatccgtagaagagcttctgcaatacgtggagcttcaagatcctgttacgcgcacgcagcttcgcgcaatggctgctaaaacggtctgcccgccgcataaagtagagcttgaagccttgcttgaaaagcaagcctacaaagaacaagtgctggcaaaacgtttaacaatgcttgaactgcttgaaaaatacccggcgtgtgaaatgaaattcagcgaatttatcgcccttctgccaagcatacgcccgcgctattactcgatttcttcatcacctcgtgtcgatgaaaaacaagcaagcatcacggtcagcgttgtctcaggagaagcgtggagcggatatggagaatataaaggaattgcgtcgaactatcttgccgagctgcaagaaggagatacgattacgtgctttatttccacaccgcagtcagaatttacgctgccaaaagaccctgaaacgccgcttatcatggtcggaccgggaacaggcgtcgcgccgtttagaggctttgtgcaggcgcgcaaacagctaaaagaacaaggacagtcacttggagaagcacatttatacttcggctgccgttcacctcatgaagactatctgtatcaagaagagcttgaaaacgcccaaagcgaaggcatcattacgcttcataccgctttttctcgcatgccaaatcagccgaaaacatacgttcagcacgtaatggaacaagacggcaagaaattgattgaacttcttgatcaaggagcgcacttctatatttgcggagacggaagccaaatggcacctgccgttgaagcaacgcttatgaaaagctatgctgacgttcaccaagtgagtgaagcagacgctcgcttatggctgcagcagctagaagaaaaaggccgatacgcaaaagacgtgtgggctgggtaa

SEQ ID NO: 70 - DNA, 3228 bp, Artificial Sequence
  BM3 variant (V78I, A82Q, F87A)
atgaaacatcaccatcaccatcaccccatgagcgattacgacatccccactactgagaatctttattttcagggcgccatggcaattaaagaaatgcctcagccaaaaacgtttggagagcttaaaaatttaccgttattaaacacagataaaccggttcaagctttgatgaaaattgcggatgaattaggagaaatctttaaattcgaggcgcctggtcgtgtaacgcgctacttatcaagtcagcgtctaattaaagaagcatgcgatgaatcacgctttgataaaaacttaagtcaagcgcttaaatttattcgtgattttcagggagacgggttagcaacaagctggacgcatgaaaaaaattggaaaaaagcgcataatatcttacttccaagcttcagtcagcaggcaatgaaaggctatcatgcgatgatggtcgatatcgccgtgcagcttgttcaaaagtgggagcgtctaaatgcagatgagcatattgaagtaccggaagacatgacacgtttaacgcttgatacaattggtctttgcggctttaactatcgctttaacagcttttaccgagatcagcctcatccatttattacaagtatggtccgtgcactggatgaagcaatgaacaagctgcagcgagcaaatccagacgacccagcttatgatgaaaacaagcgccagtttcaagaagatatcaaggtgatgaacgacctagtagataaaattattgcagatcgcaaagcaagcggtgaacaaagcgatgatttattaacgcatatgctaaacggaaaagatccagaaacgggtgagccgcttgatgacgagaacattcgctatcaaattattacattcttaattgcgggacacgaaacaacaagtggtcttttatcatttgcgctgtatttcttagtgaaaaatccacatgtattacaaaaagcagcagaagaagcagcacgagttctagtagatcctgttccaagctacaaacaagtcaaacagcttaaatatgtcggcatggtcttaaacgaagcgctgcgcttatggccaactgctcctgcgttttccctatatgcaaaagaagatacggtgcttggaggagaatatcctttagaaaaaggcgacgaactaatggttctgattcctcagcttcaccgtgataaaacaatttggggagacgatgtggaagagttccgtccagagcgttttgaaaatccaagtgcgattccgcagcatgcgtttaaaccgtttggaaacggtcagcgtgcgtgtatcggtcagcagttcgctcttcatgaagcaacgctggtacttggtatgatgctaaaacactttgactttgaagatcatacaaactacgagctggatattaaagaaactttaacgttaaaacctgaaggctttgtggtaaaagcaaaatcgaaaaaaattccgcttggcggtattccttcacctagcactgaacagtctgctaaaaaagtacgcaaaaaggcagaaaacgctcataatacgccgctgcttgtgctatacggttcaaatatgggaacagctgaaggaacggcgcgtgatttagcagatattgcaatgagcaaaggatttgcaccgcaggtcgcaacgcttgattcacacgccggaaatcttccgcgcgaaggagctgtattaattgtaacggcgtcttataacggtcatccgcctgataacgcaaagcaatttgtcgactggttagaccaagcgtctgctgatgaagtaaaaggcgttcgctactccgtatttggatgcggcgataaaaactgggctactacgtatcaaaaagtgcctgcttttatcgatgaaacgcttgccgctaaaggggcagaaaacatcgctgaccgcggtgaagcagatgcaagcgacgactttgaaggcacatatgaagaatggcgtgaacatatgtggagtgacgtagcagcctactttaacctcgacattgaaaacagtgaagataataaatctactctttcacttcaatttgtcgacagcgccgcggatatgccgcttgcgaaaatgcacggtgcgttttcaacgaacgtcgtagcaagcaaagaacttcaacagccaggcagtgcacgaagcacgcgacatcttgaaattgaacttccaaaagaagcttcttatcaagaaggagatcatttaggtgttattcctcgcaactatgaaggaatagtaaaccgtgtaacagcaaggttcggcctagatgcatcacagcaaatccgtctggaagcagaagaagaaaaattagctcatttgccactcgctaaaacagtatccgtagaagagcttctgcaatacgtggagcttcaagatcctgttacgcgcacgcagcttcgcgcaatggctgctaaaacggtctgcccgccgcataaagtagagcttgaagccttgcttgaaaagcaagcctacaaagaacaagtgctggcaaaacgtttaacaatgcttgaactgcttgaaaaatacccggcgtgtgaaatgaaattcagcgaatttatcgcccttctgccaagcatacgcccgcgctattactcgatttcttcatcacctcgtgtcgatgaaaaacaagcaagcatcacggtcagcgttgtctcaggagaagcgtggagcggatatggagaatataaaggaattgcgtcgaactatcttgccgagctgcaagaaggagatacgattacgtgctttatttccacaccgcagtcagaatttacgctgccaaaagaccctgaaacgccgcttatcatggtcggaccgggaacaggcgtcgcgccgtttagaggctttgtgcaggcgcgcaaacagctaaaagaacaaggacagtcacttggagaagcacatttatacttcggctgccgttcacctcatgaagactatctgtatcaagaagagcttgaaaacgcccaaagcgaaggcatcattacgcttcataccgctttttctcgcatgccaaatcagccgaaaacatacgttcagcacgtaatggaacaagacggcaagaaattgattgaacttcttgatcaaggagcgcacttctatatttgcggagacggaagccaaatggcacctgccgttgaagcaacgcttatgaaaagctatgctgacgttcaccaagtgagtgaagcagacgctcgcttatggctgcagcagctagaagaaaaaggccgatacgcaaaagacgtgtgggctgggtaa

SEQ ID NO: 71 - DNA, 3228 bp, Artificial Sequence
  BM3 variant (V78L, A82Q, F87A)
atgaaacatcaccatcaccatcaccccatgagcgattacgacatccccactactgagaatctttattttcagggcgccatggcaattaaagaaatgcctcagccaaaaacgtttggagagcttaaaaatttaccgttattaaacacagataaaccggttcaagctttgatgaaaattgcggatgaattaggagaaatctttaaattcgaggcgcctggtcgtgtaacgcgctacttatcaagtcagcgtctaattaaagaagcatgcgatgaatcacgctttgataaaaacttaagtcaagcgcttaaatttctgcgtgattttcagggagacgggttagcaacaagctggacgcatgaaaaaaattggaaaaaagcgcataatatcttacttccaagcttcagtcagcaggcaatgaaaggctatcatgcgatgatggtcgatatcgccgtgcagcttgttcaaaagtgggagcgtctaaatgcagatgagcatattgaagtaccggaagacatgacacgtttaacgcttgatacaattggtctttgcggctttaactatcgctttaacagcttttaccgagatcagcctcatccatttattacaagtatggtccgtgcactggatgaagcaatgaacaagctgcagcgagcaaatccagacgacccagcttatgatgaaaacaagcgccagtttcaagaagatatcaaggtgatgaacgacctagtagataaaattattgcagatcgcaaagcaagcggtgaacaaagcgatgatttattaacgcatatgctaaacggaaaagatccagaaacgggtgagccgcttgatgacgagaacattcgctatcaaattattacattcttaattgcgggacacgaaacaacaagtggtcttttatcatttgcgctgtatttcttagtgaaaaatccacatgtattacaaaaagcagcagaagaagcagcacgagttctagtagatcctgttccaagctacaaacaagtcaaacagcttaaatatgtcggcatggtcttaaacgaagcgctgcgcttatggccaactgctcctgcgttttccctatatgcaaaagaagatacggtgcttggaggagaatatcctttagaaaaaggcgacgaactaatggttctgattcctcagcttcaccgtgataaaacaatttggggagacgatgtggaagagttccgtccagagcgttttgaaaatccaagtgcgattccgcagcatgcgtttaaaccgtttggaaacggtcagcgtgcgtgtatcggtcagcagttcgctcttcatgaagcaacgctggtacttggtatgatgctaaaacactttgactttgaagatcatacaaactacgagctggatattaaagaaactttaacgttaaaacctgaaggctttgtggtaaaagcaaaatcgaaaaaaattccgcttggcggtattccttcacctagcactgaacagtctgctaaaaaagtacgcaaaaaggcagaaaacgctcataatacgccgctgcttgtgctatacggttcaaatatgggaacagctgaaggaacggcgcgtgatttagcagatattgcaatgagcaaaggatttgcaccgcaggtcgcaacgcttgattcacacgccggaaatcttccgcgcgaaggagctgtattaattgtaacggcgtcttataacggtcatccgcctgataacgcaaagcaatttgtcgactggttagaccaagcgtctgctgatgaagtaaaaggcgttcgctactccgtatttggatgcggcgataaaaactgggctactacgtatcaaaaagtgcctgcttttatcgatgaaacgcttgccgctaaaggggcagaaaacatcgctgaccgcggtgaagcagatgcaagcgacgactttgaaggcacatatgaagaatggcgtgaacatatgtggagtgacgtagcagcctactttaacctcgacattgaaaacagtgaagataataaatctactctttcacttcaatttgtcgacagcgccgcggatatgccgcttgcgaaaatgcacggtgcgttttcaacgaacgtcgtagcaagcaaagaacttcaacagccaggcagtgcacgaagcacgcgacatcttgaaattgaacttccaaaagaagcttcttatcaagaaggagatcatttaggtgttattcctcgcaactatgaaggaatagtaaaccgtgtaacagcaaggttcggcctagatgcatcacagcaaatccgtctggaagcagaagaagaaaaattagctcatttgccactcgctaaaacagtatccgtagaagagcttctgcaatacgtggagcttcaagatcctgttacgcgcacgcagcttcgcgcaatggctgctaaaacggtctgcccgccgcataaagtagagcttgaagccttgcttgaaaagcaagcctacaaagaacaagtgctggcaaaacgtttaacaatgcttgaactgcttgaaaaatacccggcgtgtgaaatgaaattcagcgaatttatcgcccttctgccaagcatacgcccgcgctattactcgatttcttcatcacctcgtgtcgatgaaaaacaagcaagcatcacggtcagcgttgtctcaggagaagcgtggagcggatatggagaatataaaggaattgcgtcgaactatcttgccgagctgcaagaaggagatacgattacgtgctttatttccacaccgcagtcagaatttacgctgccaaaagaccctgaaacgccgcttatcatggtcggaccgggaacaggcgtcgcgccgtttagaggctttgtgcaggcgcgcaaacagctaaaagaacaaggacagtcacttggagaagcacatttatacttcggctgccgttcacctcatgaagactatctgtatcaagaagagcttgaaaacgcccaaagcgaaggcatcattacgcttcataccgctttttctcgcatgccaaatcagccgaaaacatacgttcagcacgtaatggaacaagacggcaagaaattgattgaacttcttgatcaaggagcgcacttctatatttgcggagacggaagccaaatggcacctgccgttgaagcaacgcttatgaaaagctatgctgacgttcaccaagtgagtgaagcagacgctcgcttatggctgcagcagctagaagaaaaaggccgatacgcaaaagacgtgtgggctgggtaa

SEQ ID NO: 72 - DNA, 3228 bp, Artificial Sequence
  BM3 variant (V78F, A82E, F87A, M177Y, A184Y)
atgaaacatcaccatcaccatcaccccatgagcgattacgacatccccactactgagaatctttattttcagggcgccatggcaattaaagaaatgcctcagccaaaaacgtttggagagcttaaaaatttaccgttattaaacacagataaaccggttcaagctttgatgaaaattgcggatgaattaggagaaatctttaaattcgaggcgcctggtcgtgtaacgcgctacttatcaagtcagcgtctaattaaagaagcatgcgatgaatcacgctttgataaaaacttaagtcaagcgcttaaattttttcgtgattttgagggagacgggttagcaacaagctggacgcatgaaaaaaattggaaaaaagcgcataatatcttacttccaagcttcagtcagcaggcaatgaaaggctatcatgcgatgatggtcgatatcgccgtgcagcttgttcaaaagtgggagcgtctaaatgcagatgagcatattgaagtaccggaagacatgacacgtttaacgcttgatacaattggtctttgcggctttaactatcgctttaacagcttttaccgagatcagcctcatccatttattacaagttatgtccgtgcactggatgaatatatgaacaagctgcagcgagcaaatccagacgacccagcttatgatgaaaacaagcgccagtttcaagaagatatcaaggtgatgaacgacctagtagataaaattattgcagatcgcaaagcaagcggtgaacaaagcgatgatttattaacgcatatgctaaacggaaaagatccagaaacgggtgagccgcttgatgacgagaacattcgctatcaaattattacattcttaattgcgggacacgaaacaacaagtggtcttttatcatttgcgctgtatttcttagtgaaaaatccacatgtattacaaaaagcagcagaagaagcagcacgagttctagtagatcctgttccaagctacaaacaagtcaaacagcttaaatatgtcggcatggtcttaaacgaagcgctgcgcttatggccaactgctcctgcgttttccctatatgcaaaagaagatacggtgcttggaggagaatatcctttagaaaaaggcgacgaactaatggttctgattcctcagcttcaccgtgataaaacaatttggggagacgatgtggaagagttccgtccagagcgttttgaaaatccaagtgcgattccgcagcatgcgtttaaaccgtttggaaacggtcagcgtgcgtgtatcggtcagcagttcgctcttcatgaagcaacgctggtacttggtatgatgctaaaacactttgactttgaagatcatacaaactacgagctggatattaaagaaactttaacgttaaaacctgaaggctttgtggtaaaagcaaaatcgaaaaaaattccgcttggcggtattccttcacctagcactgaacagtctgctaaaaaagtacgcaaaaaggcagaaaacgctcataatacgccgctgcttgtgctatacggttcaaatatgggaacagctgaaggaacggcgcgtgatttagcagatattgcaatgagcaaaggatttgcaccgcaggtcgcaacgcttgattcacacgccggaaatcttccgcgcgaaggagctgtattaattgtaacggcgtcttataacggtcatccgcctgataacgcaaagcaatttgtcgactggttagaccaagcgtctgctgatgaagtaaaaggcgttcgctactccgtatttggatgcggcgataaaaactgggctactacgtatcaaaaagtgcctgcttttatcgatgaaacgcttgccgctaaaggggcagaaaacatcgctgaccgcggtgaagcagatgcaagcgacgactttgaaggcacatatgaagaatggcgtgaacatatgtggagtgacgtagcagcctactttaacctcgacattgaaaacagtgaagataataaatctactctttcacttcaatttgtcgacagcgccgcggatatgccgcttgcgaaaatgcacggtgcgttttcaacgaacgtcgtagcaagcaaagaacttcaacagccaggcagtgcacgaagcacgcgacatcttgaaattgaacttccaaaagaagcttcttatcaagaaggagatcatttaggtgttattcctcgcaactatgaaggaatagtaaaccgtgtaacagcaaggttcggcctagatgcatcacagcaaatccgtctggaagcagaagaagaaaaattagctcatttgccactcgctaaaacagtatccgtagaagagcttctgcaatacgtggagcttcaagatcctgttacgcgcacgcagcttcgcgcaatggctgctaaaacggtctgcccgccgcataaagtagagcttgaagccttgcttgaaaagcaagcctacaaagaacaagtgctggcaaaacgtttaacaatgcttgaactgcttgaaaaatacccggcgtgtgaaatgaaattcagcgaatttatcgcccttctgccaagcatacgcccgcgctattactcgatttcttcatcacctcgtgtcgatgaaaaacaagcaagcatcacggtcagcgttgtctcaggagaagcgtggagcggatatggagaatataaaggaattgcgtcgaactatcttgccgagctgcaagaaggagatacgattacgtgctttatttccacaccgcagtcagaatttacgctgccaaaagaccctgaaacgccgcttatcatggtcggaccgggaacaggcgtcgcgccgtttagaggctttgtgcaggcgcgcaaacagctaaaagaacaaggacagtcacttggagaagcacatttatacttcggctgccgttcacctcatgaagactatctgtatcaagaagagcttgaaaacgcccaaagcgaaggcatcattacgcttcataccgctttttctcgcatgccaaatcagccgaaaacatacgttcagcacgtaatggaacaagacggcaagaaattgattgaacttcttgatcaaggagcgcacttctatatttgcggagacggaagccaaatggcacctgccgttgaagcaacgcttatgaaaagctatgctgacgttcaccaagtgagtgaagcagacgctcgcttatggctgcagcagctagaagaaaaaggccgatacgcaaaagacgtgtgggctgggtaa

SEQ ID NO: 73 - DNA, 3228 bp, Artificial Sequence
  BM3 variant (V78L, A82E, F87A, M177Y, A184Y)
atgaaacatcaccatcaccatcaccccatgagcgattacgacatccccactactgagaatctttattttcagggcgccatggcaattaaagaaatgcctcagccaaaaacgtttggagagcttaaaaatttaccgttattaaacacagataaaccggttcaagctttgatgaaaattgcggatgaattaggagaaatctttaaattcgaggcgcctggtcgtgtaacgcgctacttatcaagtcagcgtctaattaaagaagcatgcgatgaatcacgctttgataaaaacttaagtcaagcgcttaaatttctgcgtgattttgagggagacgggttagcaacaagctggacgcatgaaaaaaattggaaaaaagcgcataatatcttacttccaagcttcagtcagcaggcaatgaaaggctatcatgcgatgatggtcgatatcgccgtgcagcttgttcaaaagtgggagcgtctaaatgcagatgagcatattgaagtaccggaagacatgacacgtttaacgcttgatacaattggtctttgcggctttaactatcgctttaacagcttttaccgagatcagcctcatccatttattacaagttatgtccgtgcactggatgaatatatgaacaagctgcagcgagcaaatccagacgacccagcttatgatgaaaacaagcgccagtttcaagaagatatcaaggtgatgaacgacctagtagataaaattattgcagatcgcaaagcaagcggtgaacaaagcgatgatttattaacgcatatgctaaacggaaaagatccagaaacgggtgagccgcttgatgacgagaacattcgctatcaaattattacattcttaattgcgggacacgaaacaacaagtggtcttttatcatttgcgctgtatttcttagtgaaaaatccacatgtattacaaaaagcagcagaagaagcagcacgagttctagtagatcctgttccaagctacaaacaagtcaaacagcttaaatatgtcggcatggtcttaaacgaagcgctgcgcttatggccaactgctcctgcgttttccctatatgcaaaagaagatacggtgcttggaggagaatatcctttagaaaaaggcgacgaactaatggttctgattcctcagcttcaccgtgataaaacaatttggggagacgatgtggaagagttccgtccagagcgttttgaaaatccaagtgcgattccgcagcatgcgtttaaaccgtttggaaacggtcagcgtgcgtgtatcggtcagcagttcgctcttcatgaagcaacgctggtacttggtatgatgctaaaacactttgactttgaagatcatacaaactacgagctggatattaaagaaactttaacgttaaaacctgaaggctttgtggtaaaagcaaaatcgaaaaaaattccgcttggcggtattccttcacctagcactgaacagtctgctaaaaaagtacgcaaaaaggcagaaaacgctcataatacgccgctgcttgtgctatacggttcaaatatgggaacagctgaaggaacggcgcgtgatttagcagatattgcaatgagcaaaggatttgcaccgcaggtcgcaacgcttgattcacacgccggaaatcttccgcgcgaaggagctgtattaattgtaacggcgtcttataacggtcatccgcctgataacgcaaagcaatttgtcgactggttagaccaagcgtctgctgatgaagtaaaaggcgttcgctactccgtatttggatgcggcgataaaaactgggctactacgtatcaaaaagtgcctgcttttatcgatgaaacgcttgccgctaaaggggcagaaaacatcgctgaccgcggtgaagcagatgcaagcgacgactttgaaggcacatatgaagaatggcgtgaacatatgtggagtgacgtagcagcctactttaacctcgacattgaaaacagtgaagataataaatctactctttcacttcaatttgtcgacagcgccgcggatatgccgcttgcgaaaatgcacggtgcgttttcaacgaacgtcgtagcaagcaaagaacttcaacagccaggcagtgcacgaagcacgcgacatcttgaaattgaacttccaaaagaagcttcttatcaagaaggagatcatttaggtgttattcctcgcaactatgaaggaatagtaaaccgtgtaacagcaaggttcggcctagatgcatcacagcaaatccgtctggaagcagaagaagaaaaattagctcatttgccactcgctaaaacagtatccgtagaagagcttctgcaatacgtggagcttcaagatcctgttacgcgcacgcagcttcgcgcaatggctgctaaaacggtctgcccgccgcataaagtagagcttgaagccttgcttgaaaagcaagcctacaaagaacaagtgctggcaaaacgtttaacaatgcttgaactgcttgaaaaatacccggcgtgtgaaatgaaattcagcgaatttatcgcccttctgccaagcatacgcccgcgctattactcgatttcttcatcacctcgtgtcgatgaaaaacaagcaagcatcacggtcagcgttgtctcaggagaagcgtggagcggatatggagaatataaaggaattgcgtcgaactatcttgccgagctgcaagaaggagatacgattacgtgctttatttccacaccgcagtcagaatttacgctgccaaaagaccctgaaacgccgcttatcatggtcggaccgggaacaggcgtcgcgccgtttagaggctttgtgcaggcgcgcaaacagctaaaagaacaaggacagtcacttggagaagcacatttatacttcggctgccgttcacctcatgaagactatctgtatcaagaagagcttgaaaacgcccaaagcgaaggcatcattacgcttcataccgctttttctcgcatgccaaatcagccgaaaacatacgttcagcacgtaatggaacaagacggcaagaaattgattgaacttcttgatcaaggagcgcacttctatatttgcggagacggaagccaaatggcacctgccgttgaagcaacgcttatgaaaagctatgctgacgttcaccaagtgagtgaagcagacgctcgcttatggctgcagcagctagaagaaaaaggccgatacgcaaaagacgtgtgggctgggtaa

SEQ ID NO: 74 - DNA, 3228 bp, Artificial Sequence
  BM3 variant (V78I, A82E, F87A, M177Y, A184Y)
atgaaacatcaccatcaccatcaccccatgagcgattacgacatccccactactgagaatctttattttcagggcgccatggcaattaaagaaatgcctcagccaaaaacgtttggagagcttaaaaatttaccgttattaaacacagataaaccggttcaagctttgatgaaaattgcggatgaattaggagaaatctttaaattcgaggcgcctggtcgtgtaacgcgctacttatcaagtcagcgtctaattaaagaagcatgcgatgaatcacgctttgataaaaacttaagtcaagcgcttaaatttattcgtgattttgagggagacgggttagcaacaagctggacgcatgaaaaaaattggaaaaaagcgcataatatcttacttccaagcttcagtcagcaggcaatgaaaggctatcatgcgatgatggtcgatatcgccgtgcagcttgttcaaaagtgggagcgtctaaatgcagatgagcatattgaagtaccggaagacatgacacgtttaacgcttgatacaattggtctttgcggctttaactatcgctttaacagcttttaccgagatcagcctcatccatttattacaagttatgtccgtgcactggatgaatatatgaacaagctgcagcgagcaaatccagacgacccagcttatgatgaaaacaagcgccagtttcaagaagatatcaaggtgatgaacgacctagtagataaaattattgcagatcgcaaagcaagcggtgaacaaagcgatgatttattaacgcatatgctaaacggaaaagatccagaaacgggtgagccgcttgatgacgagaacattcgctatcaaattattacattcttaattgcgggacacgaaacaacaagtggtcttttatcatttgcgctgtatttcttagtgaaaaatccacatgtattacaaaaagcagcagaagaagcagcacgagttctagtagatcctgttccaagctacaaacaagtcaaacagcttaaatatgtcggcatggtcttaaacgaagcgctgcgcttatggccaactgctcctgcgttttccctatatgcaaaagaagatacggtgcttggaggagaatatcctttagaaaaaggcgacgaactaatggttctgattcctcagcttcaccgtgataaaacaatttggggagacgatgtggaagagttccgtccagagcgttttgaaaatccaagtgcgattccgcagcatgcgtttaaaccgtttggaaacggtcagcgtgcgtgtatcggtcagcagttcgctcttcatgaagcaacgctggtacttggtatgatgctaaaacactttgactttgaagatcatacaaactacgagctggatattaaagaaactttaacgttaaaacctgaaggctttgtggtaaaagcaaaatcgaaaaaaattccgcttggcggtattccttcacctagcactgaacagtctgctaaaaaagtacgcaaaaaggcagaaaacgctcataatacgccgctgcttgtgctatacggttcaaatatgggaacagctgaaggaacggcgcgtgatttagcagatattgcaatgagcaaaggatttgcaccgcaggtcgcaacgcttgattcacacgccggaaatcttccgcgcgaaggagctgtattaattgtaacggcgtcttataacggtcatccgcctgataacgcaaagcaatttgtcgactggttagaccaagcgtctgctgatgaagtaaaaggcgttcgctactccgtatttggatgcggcgataaaaactgggctactacgtatcaaaaagtgcctgcttttatcgatgaaacgcttgccgctaaaggggcagaaaacatcgctgaccgcggtgaagcagatgcaagcgacgactttgaaggcacatatgaagaatggcgtgaacatatgtggagtgacgtagcagcctactttaacctcgacattgaaaacagtgaagataataaatctactctttcacttcaatttgtcgacagcgccgcggatatgccgcttgcgaaaatgcacggtgcgttttcaacgaacgtcgtagcaagcaaagaacttcaacagccaggcagtgcacgaagcacgcgacatcttgaaattgaacttccaaaagaagcttcttatcaagaaggagatcatttaggtgttattcctcgcaactatgaaggaatagtaaaccgtgtaacagcaaggttcggcctagatgcatcacagcaaatccgtctggaagcagaagaagaaaaattagctcatttgccactcgctaaaacagtatccgtagaagagcttctgcaatacgtggagcttcaagatcctgttacgcgcacgcagcttcgcgcaatggctgctaaaacggtctgcccgccgcataaagtagagcttgaagccttgcttgaaaagcaagcctacaaagaacaagtgctggcaaaacgtttaacaatgcttgaactgcttgaaaaatacccggcgtgtgaaatgaaattcagcgaatttatcgcccttctgccaagcatacgcccgcgctattactcgatttcttcatcacctcgtgtcgatgaaaaacaagcaagcatcacggtcagcgttgtctcaggagaagcgtggagcggatatggagaatataaaggaattgcgtcgaactatcttgccgagctgcaagaaggagatacgattacgtgctttatttccacaccgcagtcagaatttacgctgccaaaagaccctgaaacgccgcttatcatggtcggaccgggaacaggcgtcgcgccgtttagaggctttgtgcaggcgcgcaaacagctaaaagaacaaggacagtcacttggagaagcacatttatacttcggctgccgttcacctcatgaagactatctgtatcaagaagagcttgaaaacgcccaaagcgaaggcatcattacgcttcataccgctttttctcgcatgccaaatcagccgaaaacatacgttcagcacgtaatggaacaagacggcaagaaattgattgaacttcttgatcaaggagcgcacttctatatttgcggagacggaagccaaatggcacctgccgttgaagcaacgcttatgaaaagctatgctgacgttcaccaagtgagtgaagcagacgctcgcttatggctgcagcagctagaagaaaaaggccgatacgcaaaagacgtgtgggctgggtaa

SEQ ID NO: 75 - DNA, 3228 bp, Artificial Sequence
  BM3 variant (V78M, A82E, F87A, M177Y, A184Y)
atgaaacatcaccatcaccatcaccccatgagcgattacgacatccccactactgagaatctttattttcagggcgccatggcaattaaagaaatgcctcagccaaaaacgtttggagagcttaaaaatttaccgttattaaacacagataaaccggttcaagctttgatgaaaattgcggatgaattaggagaaatctttaaattcgaggcgcctggtcgtgtaacgcgctacttatcaagtcagcgtctaattaaagaagcatgcgatgaatcacgctttgataaaaacttaagtcaagcgcttaaatttatgcgtgattttgagggagacgggttagcaacaagctggacgcatgaaaaaaattggaaaaaagcgcataatatcttacttccaagcttcagtcagcaggcaatgaaaggctatcatgcgatgatggtcgatatcgccgtgcagcttgttcaaaagtgggagcgtctaaatgcagatgagcatattgaagtaccggaagacatgacacgtttaacgcttgatacaattggtctttgcggctttaactatcgctttaacagcttttaccgagatcagcctcatccatttattacaagttatgtccgtgcactggatgaatatatgaacaagctgcagcgagcaaatccagacgacccagcttatgatgaaaacaagcgccagtttcaagaagatatcaaggtgatgaacgacctagtagataaaattattgcagatcgcaaagcaagcggtgaacaaagcgatgatttattaacgcatatgctaaacggaaaagatccagaaacgggtgagccgcttgatgacgagaacattcgctatcaaattattacattcttaattgcgggacacgaaacaacaagtggtcttttatcatttgcgctgtatttcttagtgaaaaatccacatgtattacaaaaagcagcagaagaagcagcacgagttctagtagatcctgttccaagctacaaacaagtcaaacagcttaaatatgtcggcatggtcttaaacgaagcgctgcgcttatggccaactgctcctgcgttttccctatatgcaaaagaagatacggtgcttggaggagaatatcctttagaaaaaggcgacgaactaatggttctgattcctcagcttcaccgtgataaaacaatttggggagacgatgtggaagagttccgtccagagcgttttgaaaatccaagtgcgattccgcagcatgcgtttaaaccgtttggaaacggtcagcgtgcgtgtatcggtcagcagttcgctcttcatgaagcaacgctggtacttggtatgatgctaaaacactttgactttgaagatcatacaaactacgagctggatattaaagaaactttaacgttaaaacctgaaggctttgtggtaaaagcaaaatcgaaaaaaattccgcttggcggtattccttcacctagcactgaacagtctgctaaaaaagtacgcaaaaaggcagaaaacgctcataatacgccgctgcttgtgctatacggttcaaatatgggaacagctgaaggaacggcgcgtgatttagcagatattgcaatgagcaaaggatttgcaccgcaggtcgcaacgcttgattcacacgccggaaatcttccgcgcgaaggagctgtattaattgtaacggcgtcttataacggtcatccgcctgataacgcaaagcaatttgtcgactggttagaccaagcgtctgctgatgaagtaaaaggcgttcgctactccgtatttggatgcggcgataaaaactgggctactacgtatcaaaaagtgcctgcttttatcgatgaaacgcttgccgctaaaggggcagaaaacatcgctgaccgcggtgaagcagatgcaagcgacgactttgaaggcacatatgaagaatggcgtgaacatatgtggagtgacgtagcagcctactttaacctcgacattgaaaacagtgaagataataaatctactctttcacttcaatttgtcgacagcgccgcggatatgccgcttgcgaaaatgcacggtgcgttttcaacgaacgtcgtagcaagcaaagaacttcaacagccaggcagtgcacgaagcacgcgacatcttgaaattgaacttccaaaagaagcttcttatcaagaaggagatcatttaggtgttattcctcgcaactatgaaggaatagtaaaccgtgtaacagcaaggttcggcctagatgcatcacagcaaatccgtctggaagcagaagaagaaaaattagctcatttgccactcgctaaaacagtatccgtagaagagcttctgcaatacgtggagcttcaagatcctgttacgcgcacgcagcttcgcgcaatggctgctaaaacggtctgcccgccgcataaagtagagcttgaagccttgcttgaaaagcaagcctacaaagaacaagtgctggcaaaacgtttaacaatgcttgaactgcttgaaaaatacccggcgtgtgaaatgaaattcagcgaatttatcgcccttctgccaagcatacgcccgcgctattactcgatttcttcatcacctcgtgtcgatgaaaaacaagcaagcatcacggtcagcgttgtctcaggagaagcgtggagcggatatggagaatataaaggaattgcgtcgaactatcttgccgagctgcaagaaggagatacgattacgtgctttatttccacaccgcagtcagaatttacgctgccaaaagaccctgaaacgccgcttatcatggtcggaccgggaacaggcgtcgcgccgtttagaggctttgtgcaggcgcgcaaacagctaaaagaacaaggacagtcacttggagaagcacatttatacttcggctgccgttcacctcatgaagactatctgtatcaagaagagcttgaaaacgcccaaagcgaaggcatcattacgcttcataccgctttttctcgcatgccaaatcagccgaaaacatacgttcagcacgtaatggaacaagacggcaagaaattgattgaacttcttgatcaaggagcgcacttctatatttgcggagacggaagccaaatggcacctgccgttgaagcaacgcttatgaaaagctatgctgacgttcaccaagtgagtgaagcagacgctcgcttatggctgcagcagctagaagaaaaaggccgatacgcaaaagacgtgtgggctgggtaa

SEQ ID NO: 76 - DNA, 3228 bp, Artificial Sequence
  BM3 variant (V78Y, A82E, F87A, M177Y, A184Y)
atgaaacatcaccatcaccatcaccccatgagcgattacgacatccccactactgagaatctttattttcagggcgccatggcaattaaagaaatgcctcagccaaaaacgtttggagagcttaaaaatttaccgttattaaacacagataaaccggttcaagctttgatgaaaattgcggatgaattaggagaaatctttaaattcgaggcgcctggtcgtgtaacgcgctacttatcaagtcagcgtctaattaaagaagcatgcgatgaatcacgctttgataaaaacttaagtcaagcgcttaaattttatcgtgattttgagggagacgggttagcaacaagctggacgcatgaaaaaaattggaaaaaagcgcataatatcttacttccaagcttcagtcagcaggcaatgaaaggctatcatgcgatgatggtcgatatcgccgtgcagcttgttcaaaagtgggagcgtctaaatgcagatgagcatattgaagtaccggaagacatgacacgtttaacgcttgatacaattggtctttgcggctttaactatcgctttaacagcttttaccgagatcagcctcatccatttattacaagttatgtccgtgcactggatgaatatatgaacaagctgcagcgagcaaatccagacgacccagcttatgatgaaaacaagcgccagtttcaagaagatatcaaggtgatgaacgacctagtagataaaattattgcagatcgcaaagcaagcggtgaacaaagcgatgatttattaacgcatatgctaaacggaaaagatccagaaacgggtgagccgcttgatgacgagaacattcgctatcaaattattacattcttaattgcgggacacgaaacaacaagtggtcttttatcatttgcgctgtatttcttagtgaaaaatccacatgtattacaaaaagcagcagaagaagcagcacgagttctagtagatcctgttccaagctacaaacaagtcaaacagcttaaatatgtcggcatggtcttaaacgaagcgctgcgcttatggccaactgctcctgcgttttccctatatgcaaaagaagatacggtgcttggaggagaatatcctttagaaaaaggcgacgaactaatggttctgattcctcagcttcaccgtgataaaacaatttggggagacgatgtggaagagttccgtccagagcgttttgaaaatccaagtgcgattccgcagcatgcgtttaaaccgtttggaaacggtcagcgtgcgtgtatcggtcagcagttcgctcttcatgaagcaacgctggtacttggtatgatgctaaaacactttgactttgaagatcatacaaactacgagctggatattaaagaaactttaacgttaaaacctgaaggctttgtggtaaaagcaaaatcgaaaaaaattccgcttggcggtattccttcacctagcactgaacagtctgctaaaaaagtacgcaaaaaggcagaaaacgctcataatacgccgctgcttgtgctatacggttcaaatatgggaacagctgaaggaacggcgcgtgatttagcagatattgcaatgagcaaaggatttgcaccgcaggtcgcaacgcttgattcacacgccggaaatcttccgcgcgaaggagctgtattaattgtaacggcgtcttataacggtcatccgcctgataacgcaaagcaatttgtcgactggttagaccaagcgtctgctgatgaagtaaaaggcgttcgctactccgtatttggatgcggcgataaaaactgggctactacgtatcaaaaagtgcctgcttttatcgatgaaacgcttgccgctaaaggggcagaaaacatcgctgaccgcggtgaagcagatgcaagcgacgactttgaaggcacatatgaagaatggcgtgaacatatgtggagtgacgtagcagcctactttaacctcgacattgaaaacagtgaagataataaatctactctttcacttcaatttgtcgacagcgccgcggatatgccgcttgcgaaaatgcacggtgcgttttcaacgaacgtcgtagcaagcaaagaacttcaacagccaggcagtgcacgaagcacgcgacatcttgaaattgaacttccaaaagaagcttcttatcaagaaggagatcatttaggtgttattcctcgcaactatgaaggaatagtaaaccgtgtaacagcaaggttcggcctagatgcatcacagcaaatccgtctggaagcagaagaagaaaaattagctcatttgccactcgctaaaacagtatccgtagaagagcttctgcaatacgtggagcttcaagatcctgttacgcgcacgcagcttcgcgcaatggctgctaaaacggtctgcccgccgcataaagtagagcttgaagccttgcttgaaaagcaagcctacaaagaacaagtgctggcaaaacgtttaacaatgcttgaactgcttgaaaaatacccggcgtgtgaaatgaaattcagcgaatttatcgcccttctgccaagcatacgcccgcgctattactcgatttcttcatcacctcgtgtcgatgaaaaacaagcaagcatcacggtcagcgttgtctcaggagaagcgtggagcggatatggagaatataaaggaattgcgtcgaactatcttgccgagctgcaagaaggagatacgattacgtgctttatttccacaccgcagtcagaatttacgctgccaaaagaccctgaaacgccgcttatcatggtcggaccgggaacaggcgtcgcgccgtttagaggctttgtgcaggcgcgcaaacagctaaaagaacaaggacagtcacttggagaagcacatttatacttcggctgccgttcacctcatgaagactatctgtatcaagaagagcttgaaaacgcccaaagcgaaggcatcattacgcttcataccgctttttctcgcatgccaaatcagccgaaaacatacgttcagcacgtaatggaacaagacggcaagaaattgattgaacttcttgatcaaggagcgcacttctatatttgcggagacggaagccaaatggcacctgccgttgaagcaacgcttatgaaaagctatgctgacgttcaccaagtgagtgaagcagacgctcgcttatggctgcagcagctagaagaaaaaggccgatacgcaaaagacgtgtgggctgggtaa

SEQ ID NO: 77 - DNA, 3228 bp, Artificial Sequence
  BM3 variant (V78F, A82P, F87A, M177Y, A184Y)
atgaaacatcaccatcaccatcaccccatgagcgattacgacatccccactactgagaatctttattttcagggcgccatggcaattaaagaaatgcctcagccaaaaacgtttggagagcttaaaaatttaccgttattaaacacagataaaccggttcaagctttgatgaaaattgcggatgaattaggagaaatctttaaattcgaggcgcctggtcgtgtaacgcgctacttatcaagtcagcgtctaattaaagaagcatgcgatgaatcacgctttgataaaaacttaagtcaagcgcttaaattttttcgtgattttcctggagacgggttagcaacaagctggacgcatgaaaaaaattggaaaaaagcgcataatatcttacttccaagcttcagtcagcaggcaatgaaaggctatcatgcgatgatggtcgatatcgccgtgcagcttgttcaaaagtgggagcgtctaaatgcagatgagcatattgaagtaccggaagacatgacacgtttaacgcttgatacaattggtctttgcggctttaactatcgctttaacagcttttaccgagatcagcctcatccatttattacaagttatgtccgtgcactggatgaatatatgaacaagctgcagcgagcaaatccagacgacccagcttatgatgaaaacaagcgccagtttcaagaagatatcaaggtgatgaacgacctagtagataaaattattgcagatcgcaaagcaagcggtgaacaaagcgatgatttattaacgcatatgctaaacggaaaagatccagaaacgggtgagccgcttgatgacgagaacattcgctatcaaattattacattcttaattgcgggacacgaaacaacaagtggtcttttatcatttgcgctgtatttcttagtgaaaaatccacatgtattacaaaaagcagcagaagaagcagcacgagttctagtagatcctgttccaagctacaaacaagtcaaacagcttaaatatgtcggcatggtcttaaacgaagcgctgcgcttatggccaactgctcctgcgttttccctatatgcaaaagaagatacggtgcttggaggagaatatcctttagaaaaaggcgacgaactaatggttctgattcctcagcttcaccgtgataaaacaatttggggagacgatgtggaagagttccgtccagagcgttttgaaaatccaagtgcgattccgcagcatgcgtttaaaccgtttggaaacggtcagcgtgcgtgtatcggtcagcagttcgctcttcatgaagcaacgctggtacttggtatgatgctaaaacactttgactttgaagatcatacaaactacgagctggatattaaagaaactttaacgttaaaacctgaaggctttgtggtaaaagcaaaatcgaaaaaaattccgcttggcggtattccttcacctagcactgaacagtctgctaaaaaagtacgcaaaaaggcagaaaacgctcataatacgccgctgcttgtgctatacggttcaaatatgggaacagctgaaggaacggcgcgtgatttagcagatattgcaatgagcaaaggatttgcaccgcaggtcgcaacgcttgattcacacgccggaaatcttccgcgcgaaggagctgtattaattgtaacggcgtcttataacggtcatccgcctgataacgcaaagcaatttgtcgactggttagaccaagcgtctgctgatgaagtaaaaggcgttcgctactccgtatttggatgcggcgataaaaactgggctactacgtatcaaaaagtgcctgcttttatcgatgaaacgcttgccgctaaaggggcagaaaacatcgctgaccgcggtgaagcagatgcaagcgacgactttgaaggcacatatgaagaatggcgtgaacatatgtggagtgacgtagcagcctactttaacctcgacattgaaaacagtgaagataataaatctactctttcacttcaatttgtcgacagcgccgcggatatgccgcttgcgaaaatgcacggtgcgttttcaacgaacgtcgtagcaagcaaagaacttcaacagccaggcagtgcacgaagcacgcgacatcttgaaattgaacttccaaaagaagcttcttatcaagaaggagatcatttaggtgttattcctcgcaactatgaaggaatagtaaaccgtgtaacagcaaggttcggcctagatgcatcacagcaaatccgtctggaagcagaagaagaaaaattagctcatttgccactcgctaaaacagtatccgtagaagagcttctgcaatacgtggagcttcaagatcctgttacgcgcacgcagcttcgcgcaatggctgctaaaacggtctgcccgccgcataaagtagagcttgaagccttgcttgaaaagcaagcctacaaagaacaagtgctggcaaaacgtttaacaatgcttgaactgcttgaaaaatacccggcgtgtgaaatgaaattcagcgaatttatcgcccttctgccaagcatacgcccgcgctattactcgatttcttcatcacctcgtgtcgatgaaaaacaagcaagcatcacggtcagcgttgtctcaggagaagcgtggagcggatatggagaatataaaggaattgcgtcgaactatcttgccgagctgcaagaaggagatacgattacgtgctttatttccacaccgcagtcagaatttacgctgccaaaagaccctgaaacgccgcttatcatggtcggaccgggaacaggcgtcgcgccgtttagaggctttgtgcaggcgcgcaaacagctaaaagaacaaggacagtcacttggagaagcacatttatacttcggctgccgttcacctcatgaagactatctgtatcaagaagagcttgaaaacgcccaaagcgaaggcatcattacgcttcataccgctttttctcgcatgccaaatcagccgaaaacatacgttcagcacgtaatggaacaagacggcaagaaattgattgaacttcttgatcaaggagcgcacttctatatttgcggagacggaagccaaatggcacctgccgttgaagcaacgcttatgaaaagctatgctgacgttcaccaagtgagtgaagcagacgctcgcttatggctgcagcagctagaagaaaaaggccgatacgcaaaagacgtgtgggctgggtaa

SEQ ID NO: 78 - DNA, 3228 bp, Artificial Sequence
  BM3 variant (V78L, A82P, F87A, M177Y, A184Y)
atgaaacatcaccatcaccatcaccccatgagcgattacgacatccccactactgagaatctttattttcagggcgccatggcaattaaagaaatgcctcagccaaaaacgtttggagagcttaaaaatttaccgttattaaacacagataaaccggttcaagctttgatgaaaattgcggatgaattaggagaaatctttaaattcgaggcgcctggtcgtgtaacgcgctacttatcaagtcagcgtctaattaaagaagcatgcgatgaatcacgctttgataaaaacttaagtcaagcgcttaaatttctgcgtgattttcctggagacgggttagcaacaagctggacgcatgaaaaaaattggaaaaaagcgcataatatcttacttccaagcttcagtcagcaggcaatgaaaggctatcatgcgatgatggtcgatatcgccgtgcagcttgttcaaaagtgggagcgtctaaatgcagatgagcatattgaagtaccggaagacatgacacgtttaacgcttgatacaattggtctttgcggctttaactatcgctttaacagcttttaccgagatcagcctcatccatttattacaagttatgtccgtgcactggatgaatatatgaacaagctgcagcgagcaaatccagacgacccagcttatgatgaaaacaagcgccagtttcaagaagatatcaaggtgatgaacgacctagtagataaaattattgcagatcgcaaagcaagcggtgaacaaagcgatgatttattaacgcatatgctaaacggaaaagatccagaaacgggtgagccgcttgatgacgagaacattcgctatcaaattattacattcttaattgcgggacacgaaacaacaagtggtcttttatcatttgcgctgtatttcttagtgaaaaatccacatgtattacaaaaagcagcagaagaagcagcacgagttctagtagatcctgttccaagctacaaacaagtcaaacagcttaaatatgtcggcatggtcttaaacgaagcgctgcgcttatggccaactgctcctgcgttttccctatatgcaaaagaagatacggtgcttggaggagaatatcctttagaaaaaggcgacgaactaatggttctgattcctcagcttcaccgtgataaaacaatttggggagacgatgtggaagagttccgtccagagcgttttgaaaatccaagtgcgattccgcagcatgcgtttaaaccgtttggaaacggtcagcgtgcgtgtatcggtcagcagttcgctcttcatgaagcaacgctggtacttggtatgatgctaaaacactttgactttgaagatcatacaaactacgagctggatattaaagaaactttaacgttaaaacctgaaggctttgtggtaaaagcaaaatcgaaaaaaattccgcttggcggtattccttcacctagcactgaacagtctgctaaaaaagtacgcaaaaaggcagaaaacgctcataatacgccgctgcttgtgctatacggttcaaatatgggaacagctgaaggaacggcgcgtgatttagcagatattgcaatgagcaaaggatttgcaccgcaggtcgcaacgcttgattcacacgccggaaatcttccgcgcgaaggagctgtattaattgtaacggcgtcttataacggtcatccgcctgataacgcaaagcaatttgtcgactggttagaccaagcgtctgctgatgaagtaaaaggcgttcgctactccgtatttggatgcggcgataaaaactgggctactacgtatcaaaaagtgcctgcttttatcgatgaaacgcttgccgctaaaggggcagaaaacatcgctgaccgcggtgaagcagatgcaagcgacgactttgaaggcacatatgaagaatggcgtgaacatatgtggagtgacgtagcagcctactttaacctcgacattgaaaacagtgaagataataaatctactctttcacttcaatttgtcgacagcgccgcggatatgccgcttgcgaaaatgcacggtgcgttttcaacgaacgtcgtagcaagcaaagaacttcaacagccaggcagtgcacgaagcacgcgacatcttgaaattgaacttccaaaagaagcttcttatcaagaaggagatcatttaggtgttattcctcgcaactatgaaggaatagtaaaccgtgtaacagcaaggttcggcctagatgcatcacagcaaatccgtctggaagcagaagaagaaaaattagctcatttgccactcgctaaaacagtatccgtagaagagcttctgcaatacgtggagcttcaagatcctgttacgcgcacgcagcttcgcgcaatggctgctaaaacggtctgcccgccgcataaagtagagcttgaagccttgcttgaaaagcaagcctacaaagaacaagtgctggcaaaacgtttaacaatgcttgaactgcttgaaaaatacccggcgtgtgaaatgaaattcagcgaatttatcgcccttctgccaagcatacgcccgcgctattactcgatttcttcatcacctcgtgtcgatgaaaaacaagcaagcatcacggtcagcgttgtctcaggagaagcgtggagcggatatggagaatataaaggaattgcgtcgaactatcttgccgagctgcaagaaggagatacgattacgtgctttatttccacaccgcagtcagaatttacgctgccaaaagaccctgaaacgccgcttatcatggtcggaccgggaacaggcgtcgcgccgtttagaggctttgtgcaggcgcgcaaacagctaaaagaacaaggacagtcacttggagaagcacatttatacttcggctgccgttcacctcatgaagactatctgtatcaagaagagcttgaaaacgcccaaagcgaaggcatcattacgcttcataccgctttttctcgcatgccaaatcagccgaaaacatacgttcagcacgtaatggaacaagacggcaagaaattgattgaacttcttgatcaaggagcgcacttctatatttgcggagacggaagccaaatggcacctgccgttgaagcaacgcttatgaaaagctatgctgacgttcaccaagtgagtgaagcagacgctcgcttatggctgcagcagctagaagaaaaaggccgatacgcaaaagacgtgtgggctgggtaa

SEQ ID NO: 79 - DNA, 3228 bp, Artificial Sequence
  BM3 variant (V78I, A82P, F87A, M177Y, A184Y)
atgaaacatcaccatcaccatcaccccatgagcgattacgacatccccactactgagaatctttattttcagggcgccatggcaattaaagaaatgcctcagccaaaaacgtttggagagcttaaaaatttaccgttattaaacacagataaaccggttcaagctttgatgaaaattgcggatgaattaggagaaatctttaaattcgaggcgcctggtcgtgtaacgcgctacttatcaagtcagcgtctaattaaagaagcatgcgatgaatcacgctttgataaaaacttaagtcaagcgcttaaatttattcgtgattttcctggagacgggttagcaacaagctggacgcatgaaaaaaattggaaaaaagcgcataatatcttacttccaagcttcagtcagcaggcaatgaaaggctatcatgcgatgatggtcgatatcgccgtgcagcttgttcaaaagtgggagcgtctaaatgcagatgagcatattgaagtaccggaagacatgacacgtttaacgcttgatacaattggtctttgcggctttaactatcgctttaacagcttttaccgagatcagcctcatccatttattacaagttatgtccgtgcactggatgaatatatgaacaagctgcagcgagcaaatccagacgacccagcttatgatgaaaacaagcgccagtttcaagaagatatcaaggtgatgaacgacctagtagataaaattattgcagatcgcaaagcaagcggtgaacaaagcgatgatttattaacgcatatgctaaacggaaaagatccagaaacgggtgagccgcttgatgacgagaacattcgctatcaaattattacattcttaattgcgggacacgaaacaacaagtggtcttttatcatttgcgctgtatttcttagtgaaaaatccacatgtattacaaaaagcagcagaagaagcagcacgagttctagtagatcctgttccaagctacaaacaagtcaaacagcttaaatatgtcggcatggtcttaaacgaagcgctgcgcttatggccaactgctcctgcgttttccctatatgcaaaagaagatacggtgcttggaggagaatatcctttagaaaaaggcgacgaactaatggttctgattcctcagcttcaccgtgataaaacaatttggggagacgatgtggaagagttccgtccagagcgttttgaaaatccaagtgcgattccgcagcatgcgtttaaaccgtttggaaacggtcagcgtgcgtgtatcggtcagcagttcgctcttcatgaagcaacgctggtacttggtatgatgctaaaacactttgactttgaagatcatacaaactacgagctggatattaaagaaactttaacgttaaaacctgaaggctttgtggtaaaagcaaaatcgaaaaaaattccgcttggcggtattccttcacctagcactgaacagtctgctaaaaaagtacgcaaaaaggcagaaaacgctcataatacgccgctgcttgtgctatacggttcaaatatgggaacagctgaaggaacggcgcgtgatttagcagatattgcaatgagcaaaggatttgcaccgcaggtcgcaacgcttgattcacacgccggaaatcttccgcgcgaaggagctgtattaattgtaacggcgtcttataacggtcatccgcctgataacgcaaagcaatttgtcgactggttagaccaagcgtctgctgatgaagtaaaaggcgttcgctactccgtatttggatgcggcgataaaaactgggctactacgtatcaaaaagtgcctgcttttatcgatgaaacgcttgccgctaaaggggcagaaaacatcgctgaccgcggtgaagcagatgcaagcgacgactttgaaggcacatatgaagaatggcgtgaacatatgtggagtgacgtagcagcctactttaacctcgacattgaaaacagtgaagataataaatctactctttcacttcaatttgtcgacagcgccgcggatatgccgcttgcgaaaatgcacggtgcgttttcaacgaacgtcgtagcaagcaaagaacttcaacagccaggcagtgcacgaagcacgcgacatcttgaaattgaacttccaaaagaagcttcttatcaagaaggagatcatttaggtgttattcctcgcaactatgaaggaatagtaaaccgtgtaacagcaaggttcggcctagatgcatcacagcaaatccgtctggaagcagaagaagaaaaattagctcatttgccactcgctaaaacagtatccgtagaagagcttctgcaatacgtggagcttcaagatcctgttacgcgcacgcagcttcgcgcaatggctgctaaaacggtctgcccgccgcataaagtagagcttgaagccttgcttgaaaagcaagcctacaaagaacaagtgctggcaaaacgtttaacaatgcttgaactgcttgaaaaatacccggcgtgtgaaatgaaattcagcgaatttatcgcccttctgccaagcatacgcccgcgctattactcgatttcttcatcacctcgtgtcgatgaaaaacaagcaagcatcacggtcagcgttgtctcaggagaagcgtggagcggatatggagaatataaaggaattgcgtcgaactatcttgccgagctgcaagaaggagatacgattacgtgctttatttccacaccgcagtcagaatttacgctgccaaaagaccctgaaacgccgcttatcatggtcggaccgggaacaggcgtcgcgccgtttagaggctttgtgcaggcgcgcaaacagctaaaagaacaaggacagtcacttggagaagcacatttatacttcggctgccgttcacctcatgaagactatctgtatcaagaagagcttgaaaacgcccaaagcgaaggcatcattacgcttcataccgctttttctcgcatgccaaatcagccgaaaacatacgttcagcacgtaatggaacaagacggcaagaaattgattgaacttcttgatcaaggagcgcacttctatatttgcggagacggaagccaaatggcacctgccgttgaagcaacgcttatgaaaagctatgctgacgttcaccaagtgagtgaagcagacgctcgcttatggctgcagcagctagaagaaaaaggccgatacgcaaaagacgtgtgggctgggtaa

SEQ ID NO: 80 - DNA, 3228 bp, Artificial Sequence
  BM3 variant (V78M, A82P, F87A, M177Y, A184Y)
atgaaacatcaccatcaccatcaccccatgagcgattacgacatccccactactgagaatctttattttcagggcgccatggcaattaaagaaatgcctcagccaaaaacgtttggagagcttaaaaatttaccgttattaaacacagataaaccggttcaagctttgatgaaaattgcggatgaattaggagaaatctttaaattcgaggcgcctggtcgtgtaacgcgctacttatcaagtcagcgtctaattaaagaagcatgcgatgaatcacgctttgataaaaacttaagtcaagcgcttaaatttatgcgtgattttcctggagacgggttagcaacaagctggacgcatgaaaaaaattggaaaaaagcgcataatatcttacttccaagcttcagtcagcaggcaatgaaaggctatcatgcgatgatggtcgatatcgccgtgcagcttgttcaaaagtgggagcgtctaaatgcagatgagcatattgaagtaccggaagacatgacacgtttaacgcttgatacaattggtctttgcggctttaactatcgctttaacagcttttaccgagatcagcctcatccatttattacaagttatgtccgtgcactggatgaatatatgaacaagctgcagcgagcaaatccagacgacccagcttatgatgaaaacaagcgccagtttcaagaagatatcaaggtgatgaacgacctagtagataaaattattgcagatcgcaaagcaagcggtgaacaaagcgatgatttattaacgcatatgctaaacggaaaagatccagaaacgggtgagccgcttgatgacgagaacattcgctatcaaattattacattcttaattgcgggacacgaaacaacaagtggtcttttatcatttgcgctgtatttcttagtgaaaaatccacatgtattacaaaaagcagcagaagaagcagcacgagttctagtagatcctgttccaagctacaaacaagtcaaacagcttaaatatgtcggcatggtcttaaacgaagcgctgcgcttatggccaactgctcctgcgttttccctatatgcaaaagaagatacggtgcttggaggagaatatcctttagaaaaaggcgacgaactaatggttctgattcctcagcttcaccgtgataaaacaatttggggagacgatgtggaagagttccgtccagagcgttttgaaaatccaagtgcgattccgcagcatgcgtttaaaccgtttggaaacggtcagcgtgcgtgtatcggtcagcagttcgctcttcatgaagcaacgctggtacttggtatgatgctaaaacactttgactttgaagatcatacaaactacgagctggatattaaagaaactttaacgttaaaacctgaaggctttgtggtaaaagcaaaatcgaaaaaaattccgcttggcggtattccttcacctagcactgaacagtctgctaaaaaagtacgcaaaaaggcagaaaacgctcataatacgccgctgcttgtgctatacggttcaaatatgggaacagctgaaggaacggcgcgtgatttagcagatattgcaatgagcaaaggatttgcaccgcaggtcgcaacgcttgattcacacgccggaaatcttccgcgcgaaggagctgtattaattgtaacggcgtcttataacggtcatccgcctgataacgcaaagcaatttgtcgactggttagaccaagcgtctgctgatgaagtaaaaggcgttcgctactccgtatttggatgcggcgataaaaactgggctactacgtatcaaaaagtgcctgcttttatcgatgaaacgcttgccgctaaaggggcagaaaacatcgctgaccgcggtgaagcagatgcaagcgacgactttgaaggcacatatgaagaatggcgtgaacatatgtggagtgacgtagcagcctactttaacctcgacattgaaaacagtgaagataataaatctactctttcacttcaatttgtcgacagcgccgcggatatgccgcttgcgaaaatgcacggtgcgttttcaacgaacgtcgtagcaagcaaagaacttcaacagccaggcagtgcacgaagcacgcgacatcttgaaattgaacttccaaaagaagcttcttatcaagaaggagatcatttaggtgttattcctcgcaactatgaaggaatagtaaaccgtgtaacagcaaggttcggcctagatgcatcacagcaaatccgtctggaagcagaagaagaaaaattagctcatttgccactcgctaaaacagtatccgtagaagagcttctgcaatacgtggagcttcaagatcctgttacgcgcacgcagcttcgcgcaatggctgctaaaacggtctgcccgccgcataaagtagagcttgaagccttgcttgaaaagcaagcctacaaagaacaagtgctggcaaaacgtttaacaatgcttgaactgcttgaaaaatacccggcgtgtgaaatgaaattcagcgaatttatcgcccttctgccaagcatacgcccgcgctattactcgatttcttcatcacctcgtgtcgatgaaaaacaagcaagcatcacggtcagcgttgtctcaggagaagcgtggagcggatatggagaatataaaggaattgcgtcgaactatcttgccgagctgcaagaaggagatacgattacgtgctttatttccacaccgcagtcagaatttacgctgccaaaagaccctgaaacgccgcttatcatggtcggaccgggaacaggcgtcgcgccgtttagaggctttgtgcaggcgcgcaaacagctaaaagaacaaggacagtcacttggagaagcacatttatacttcggctgccgttcacctcatgaagactatctgtatcaagaagagcttgaaaacgcccaaagcgaaggcatcattacgcttcataccgctttttctcgcatgccaaatcagccgaaaacatacgttcagcacgtaatggaacaagacggcaagaaattgattgaacttcttgatcaaggagcgcacttctatatttgcggagacggaagccaaatggcacctgccgttgaagcaacgcttatgaaaagctatgctgacgttcaccaagtgagtgaagcagacgctcgcttatggctgcagcagctagaagaaaaaggccgatacgcaaaagacgtgtgggctgggtaa

SEQ ID NO: 81 - DNA, 3228 bp, Artificial Sequence
  BM3 variant (V78Y, A82P, F87A, M177Y, A184Y)
atgaaacatcaccatcaccatcaccccatgagcgattacgacatccccactactgagaatctttattttcagggcgccatggcaattaaagaaatgcctcagccaaaaacgtttggagagcttaaaaatttaccgttattaaacacagataaaccggttcaagctttgatgaaaattgcggatgaattaggagaaatctttaaattcgaggcgcctggtcgtgtaacgcgctacttatcaagtcagcgtctaattaaagaagcatgcgatgaatcacgctttgataaaaacttaagtcaagcgcttaaattttatcgtgattttcctggagacgggttagcaacaagctggacgcatgaaaaaaattggaaaaaagcgcataatatcttacttccaagcttcagtcagcaggcaatgaaaggctatcatgcgatgatggtcgatatcgccgtgcagcttgttcaaaagtgggagcgtctaaatgcagatgagcatattgaagtaccggaagacatgacacgtttaacgcttgatacaattggtctttgcggctttaactatcgctttaacagcttttaccgagatcagcctcatccatttattacaagttatgtccgtgcactggatgaatatatgaacaagctgcagcgagcaaatccagacgacccagcttatgatgaaaacaagcgccagtttcaagaagatatcaaggtgatgaacgacctagtagataaaattattgcagatcgcaaagcaagcggtgaacaaagcgatgatttattaacgcatatgctaaacggaaaagatccagaaacgggtgagccgcttgatgacgagaacattcgctatcaaattattacattcttaattgcgggacacgaaacaacaagtggtcttttatcatttgcgctgtatttcttagtgaaaaatccacatgtattacaaaaagcagcagaagaagcagcacgagttctagtagatcctgttccaagctacaaacaagtcaaacagcttaaatatgtcggcatggtcttaaacgaagcgctgcgcttatggccaactgctcctgcgttttccctatatgcaaaagaagatacggtgcttggaggagaatatcctttagaaaaaggcgacgaactaatggttctgattcctcagcttcaccgtgataaaacaatttggggagacgatgtggaagagttccgtccagagcgttttgaaaatccaagtgcgattccgcagcatgcgtttaaaccgtttggaaacggtcagcgtgcgtgtatcggtcagcagttcgctcttcatgaagcaacgctggtacttggtatgatgctaaaacactttgactttgaagatcatacaaactacgagctggatattaaagaaactttaacgttaaaacctgaaggctttgtggtaaaagcaaaatcgaaaaaaattccgcttggcggtattccttcacctagcactgaacagtctgctaaaaaagtacgcaaaaaggcagaaaacgctcataatacgccgctgcttgtgctatacggttcaaatatgggaacagctgaaggaacggcgcgtgatttagcagatattgcaatgagcaaaggatttgcaccgcaggtcgcaacgcttgattcacacgccggaaatcttccgcgcgaaggagctgtattaattgtaacggcgtcttataacggtcatccgcctgataacgcaaagcaatttgtcgactggttagaccaagcgtctgctgatgaagtaaaaggcgttcgctactccgtatttggatgcggcgataaaaactgggctactacgtatcaaaaagtgcctgcttttatcgatgaaacgcttgccgctaaaggggcagaaaacatcgctgaccgcggtgaagcagatgcaagcgacgactttgaaggcacatatgaagaatggcgtgaacatatgtggagtgacgtagcagcctactttaacctcgacattgaaaacagtgaagataataaatctactctttcacttcaatttgtcgacagcgccgcggatatgccgcttgcgaaaatgcacggtgcgttttcaacgaacgtcgtagcaagcaaagaacttcaacagccaggcagtgcacgaagcacgcgacatcttgaaattgaacttccaaaagaagcttcttatcaagaaggagatcatttaggtgttattcctcgcaactatgaaggaatagtaaaccgtgtaacagcaaggttcggcctagatgcatcacagcaaatccgtctggaagcagaagaagaaaaattagctcatttgccactcgctaaaacagtatccgtagaagagcttctgcaatacgtggagcttcaagatcctgttacgcgcacgcagcttcgcgcaatggctgctaaaacggtctgcccgccgcataaagtagagcttgaagccttgcttgaaaagcaagcctacaaagaacaagtgctggcaaaacgtttaacaatgcttgaactgcttgaaaaatacccggcgtgtgaaatgaaattcagcgaatttatcgcccttctgccaagcatacgcccgcgctattactcgatttcttcatcacctcgtgtcgatgaaaaacaagcaagcatcacggtcagcgttgtctcaggagaagcgtggagcggatatggagaatataaaggaattgcgtcgaactatcttgccgagctgcaagaaggagatacgattacgtgctttatttccacaccgcagtcagaatttacgctgccaaaagaccctgaaacgccgcttatcatggtcggaccgggaacaggcgtcgcgccgtttagaggctttgtgcaggcgcgcaaacagctaaaagaacaaggacagtcacttggagaagcacatttatacttcggctgccgttcacctcatgaagactatctgtatcaagaagagcttgaaaacgcccaaagcgaaggcatcattacgcttcataccgctttttctcgcatgccaaatcagccgaaaacatacgttcagcacgtaatggaacaagacggcaagaaattgattgaacttcttgatcaaggagcgcacttctatatttgcggagacggaagccaaatggcacctgccgttgaagcaacgcttatgaaaagctatgctgacgttcaccaagtgagtgaagcagacgctcgcttatggctgcagcagctagaagaaaaaggccgatacgcaaaagacgtgtgggctgggtaa

SEQ ID NO: 82 - DNA, 3228 bp, Artificial Sequence
  BM3 variant (V78F, A82Q, F87A, M177Y, A184Y)
atgaaacatcaccatcaccatcaccccatgagcgattacgacatccccactactgagaatctttattttcagggcgccatggcaattaaagaaatgcctcagccaaaaacgtttggagagcttaaaaatttaccgttattaaacacagataaaccggttcaagctttgatgaaaattgcggatgaattaggagaaatctttaaattcgaggcgcctggtcgtgtaacgcgctacttatcaagtcagcgtctaattaaagaagcatgcgatgaatcacgctttgataaaaacttaagtcaagcgcttaaattttttcgtgattttcagggagacgggttagcaacaagctggacgcatgaaaaaaattggaaaaaagcgcataatatcttacttccaagcttcagtcagcaggcaatgaaaggctatcatgcgatgatggtcgatatcgccgtgcagcttgttcaaaagtgggagcgtctaaatgcagatgagcatattgaagtaccggaagacatgacacgtttaacgcttgatacaattggtctttgcggctttaactatcgctttaacagcttttaccgagatcagcctcatccatttattacaagttatgtccgtgcactggatgaatatatgaacaagctgcagcgagcaaatccagacgacccagcttatgatgaaaacaagcgccagtttcaagaagatatcaaggtgatgaacgacctagtagataaaattattgcagatcgcaaagcaagcggtgaacaaagcgatgatttattaacgcatatgctaaacggaaaagatccagaaacgggtgagccgcttgatgacgagaacattcgctatcaaattattacattcttaattgcgggacacgaaacaacaagtggtcttttatcatttgcgctgtatttcttagtgaaaaatccacatgtattacaaaaagcagcagaagaagcagcacgagttctagtagatcctgttccaagctacaaacaagtcaaacagcttaaatatgtcggcatggtcttaaacgaagcgctgcgcttatggccaactgctcctgcgttttccctatatgcaaaagaagatacggtgcttggaggagaatatcctttagaaaaaggcgacgaactaatggttctgattcctcagcttcaccgtgataaaacaatttggggagacgatgtggaagagttccgtccagagcgttttgaaaatccaagtgcgattccgcagcatgcgtttaaaccgtttggaaacggtcagcgtgcgtgtatcggtcagcagttcgctcttcatgaagcaacgctggtacttggtatgatgctaaaacactttgactttgaagatcatacaaactacgagctggatattaaagaaactttaacgttaaaacctgaaggctttgtggtaaaagcaaaatcgaaaaaaattccgcttggcggtattccttcacctagcactgaacagtctgctaaaaaagtacgcaaaaaggcagaaaacgctcataatacgccgctgcttgtgctatacggttcaaatatgggaacagctgaaggaacggcgcgtgatttagcagatattgcaatgagcaaaggatttgcaccgcaggtcgcaacgcttgattcacacgccggaaatcttccgcgcgaaggagctgtattaattgtaacggcgtcttataacggtcatccgcctgataacgcaaagcaatttgtcgactggttagaccaagcgtctgctgatgaagtaaaaggcgttcgctactccgtatttggatgcggcgataaaaactgggctactacgtatcaaaaagtgcctgcttttatcgatgaaacgcttgccgctaaaggggcagaaaacatcgctgaccgcggtgaagcagatgcaagcgacgactttgaaggcacatatgaagaatggcgtgaacatatgtggagtgacgtagcagcctactttaacctcgacattgaaaacagtgaagataataaatctactctttcacttcaatttgtcgacagcgccgcggatatgccgcttgcgaaaatgcacggtgcgttttcaacgaacgtcgtagcaagcaaagaacttcaacagccaggcagtgcacgaagcacgcgacatcttgaaattgaacttccaaaagaagcttcttatcaagaaggagatcatttaggtgttattcctcgcaactatgaaggaatagtaaaccgtgtaacagcaaggttcggcctagatgcatcacagcaaatccgtctggaagcagaagaagaaaaattagctcatttgccactcgctaaaacagtatccgtagaagagcttctgcaatacgtggagcttcaagatcctgttacgcgcacgcagcttcgcgcaatggctgctaaaacggtctgcccgccgcataaagtagagcttgaagccttgcttgaaaagcaagcctacaaagaacaagtgctggcaaaacgtttaacaatgcttgaactgcttgaaaaatacccggcgtgtgaaatgaaattcagcgaatttatcgcccttctgccaagcatacgcccgcgctattactcgatttcttcatcacctcgtgtcgatgaaaaacaagcaagcatcacggtcagcgttgtctcaggagaagcgtggagcggatatggagaatataaaggaattgcgtcgaactatcttgccgagctgcaagaaggagatacgattacgtgctttatttccacaccgcagtcagaatttacgctgccaaaagaccctgaaacgccgcttatcatggtcggaccgggaacaggcgtcgcgccgtttagaggctttgtgcaggcgcgcaaacagctaaaagaacaaggacagtcacttggagaagcacatttatacttcggctgccgttcacctcatgaagactatctgtatcaagaagagcttgaaaacgcccaaagcgaaggcatcattacgcttcataccgctttttctcgcatgccaaatcagccgaaaacatacgttcagcacgtaatggaacaagacggcaagaaattgattgaacttcttgatcaaggagcgcacttctatatttgcggagacggaagccaaatggcacctgccgttgaagcaacgcttatgaaaagctatgctgacgttcaccaagtgagtgaagcagacgctcgcttatggctgcagcagctagaagaaaaaggccgatacgcaaaagacgtgtgggctgggtaa

SEQ ID NO: 83 - DNA, 3228 bp, Artificial Sequence
  BM3 variant (V78L, A82Q, F87A, M177Y, A184Y)
atgaaacatcaccatcaccatcaccccatgagcgattacgacatccccactactgagaatctttattttcagggcgccatggcaattaaagaaatgcctcagccaaaaacgtttggagagcttaaaaatttaccgttattaaacacagataaaccggttcaagctttgatgaaaattgcggatgaattaggagaaatctttaaattcgaggcgcctggtcgtgtaacgcgctacttatcaagtcagcgtctaattaaagaagcatgcgatgaatcacgctttgataaaaacttaagtcaagcgcttaaatttctgcgtgattttcagggagacgggttagcaacaagctggacgcatgaaaaaaattggaaaaaagcgcataatatcttacttccaagcttcagtcagcaggcaatgaaaggctatcatgcgatgatggtcgatatcgccgtgcagcttgttcaaaagtgggagcgtctaaatgcagatgagcatattgaagtaccggaagacatgacacgtttaacgcttgatacaattggtctttgcggctttaactatcgctttaacagcttttaccgagatcagcctcatccatttattacaagttatgtccgtgcactggatgaatatatgaacaagctgcagcgagcaaatccagacgacccagcttatgatgaaaacaagcgccagtttcaagaagatatcaaggtgatgaacgacctagtagataaaattattgcagatcgcaaagcaagcggtgaacaaagcgatgatttattaacgcatatgctaaacggaaaagatccagaaacgggtgagccgcttgatgacgagaacattcgctatcaaattattacattcttaattgcgggacacgaaacaacaagtggtcttttatcatttgcgctgtatttcttagtgaaaaatccacatgtattacaaaaagcagcagaagaagcagcacgagttctagtagatcctgttccaagctacaaacaagtcaaacagcttaaatatgtcggcatggtcttaaacgaagcgctgcgcttatggccaactgctcctgcgttttccctatatgcaaaagaagatacggtgcttggaggagaatatcctttagaaaaaggcgacgaactaatggttctgattcctcagcttcaccgtgataaaacaatttggggagacgatgtggaagagttccgtccagagcgttttgaaaatccaagtgcgattccgcagcatgcgtttaaaccgtttggaaacggtcagcgtgcgtgtatcggtcagcagttcgctcttcatgaagcaacgctggtacttggtatgatgctaaaacactttgactttgaagatcatacaaactacgagctggatattaaagaaactttaacgttaaaacctgaaggctttgtggtaaaagcaaaatcgaaaaaaattccgcttggcggtattccttcacctagcactgaacagtctgctaaaaaagtacgcaaaaaggcagaaaacgctcataatacgccgctgcttgtgctatacggttcaaatatgggaacagctgaaggaacggcgcgtgatttagcagatattgcaatgagcaaaggatttgcaccgcaggtcgcaacgcttgattcacacgccggaaatcttccgcgcgaaggagctgtattaattgtaacggcgtcttataacggtcatccgcctgataacgcaaagcaatttgtcgactggttagaccaagcgtctgctgatgaagtaaaaggcgttcgctactccgtatttggatgcggcgataaaaactgggctactacgtatcaaaaagtgcctgcttttatcgatgaaacgcttgccgctaaaggggcagaaaacatcgctgaccgcggtgaagcagatgcaagcgacgactttgaaggcacatatgaagaatggcgtgaacatatgtggagtgacgtagcagcctactttaacctcgacattgaaaacagtgaagataataaatctactctttcacttcaatttgtcgacagcgccgcggatatgccgcttgcgaaaatgcacggtgcgttttcaacgaacgtcgtagcaagcaaagaacttcaacagccaggcagtgcacgaagcacgcgacatcttgaaattgaacttccaaaagaagcttcttatcaagaaggagatcatttaggtgttattcctcgcaactatgaaggaatagtaaaccgtgtaacagcaaggttcggcctagatgcatcacagcaaatccgtctggaagcagaagaagaaaaattagctcatttgccactcgctaaaacagtatccgtagaagagcttctgcaatacgtggagcttcaagatcctgttacgcgcacgcagcttcgcgcaatggctgctaaaacggtctgcccgccgcataaagtagagcttgaagccttgcttgaaaagcaagcctacaaagaacaagtgctggcaaaacgtttaacaatgcttgaactgcttgaaaaatacccggcgtgtgaaatgaaattcagcgaatttatcgcccttctgccaagcatacgcccgcgctattactcgatttcttcatcacctcgtgtcgatgaaaaacaagcaagcatcacggtcagcgttgtctcaggagaagcgtggagcggatatggagaatataaaggaattgcgtcgaactatcttgccgagctgcaagaaggagatacgattacgtgctttatttccacaccgcagtcagaatttacgctgccaaaagaccctgaaacgccgcttatcatggtcggaccgggaacaggcgtcgcgccgtttagaggctttgtgcaggcgcgcaaacagctaaaagaacaaggacagtcacttggagaagcacatttatacttcggctgccgttcacctcatgaagactatctgtatcaagaagagcttgaaaacgcccaaagcgaaggcatcattacgcttcataccgctttttctcgcatgccaaatcagccgaaaacatacgttcagcacgtaatggaacaagacggcaagaaattgattgaacttcttgatcaaggagcgcacttctatatttgcggagacggaagccaaatggcacctgccgttgaagcaacgcttatgaaaagctatgctgacgttcaccaagtgagtgaagcagacgctcgcttatggctgcagcagctagaagaaaaaggccgatacgcaaaagacgtgtgggctgggtaa

SEQ ID NO: 84 - DNA, 3228 bp, Artificial Sequence
  BM3 variant (V78I, A82Q, F87A, M177Y, A184Y)
atgaaacatcaccatcaccatcaccccatgagcgattacgacatccccactactgagaatctttattttcagggcgccatggcaattaaagaaatgcctcagccaaaaacgtttggagagcttaaaaatttaccgttattaaacacagataaaccggttcaagctttgatgaaaattgcggatgaattaggagaaatctttaaattcgaggcgcctggtcgtgtaacgcgctacttatcaagtcagcgtctaattaaagaagcatgcgatgaatcacgctttgataaaaacttaagtcaagcgcttaaatttattcgtgattttcagggagacgggttagcaacaagctggacgcatgaaaaaaattggaaaaaagcgcataatatcttacttccaagcttcagtcagcaggcaatgaaaggctatcatgcgatgatggtcgatatcgccgtgcagcttgttcaaaagtgggagcgtctaaatgcagatgagcatattgaagtaccggaagacatgacacgtttaacgcttgatacaattggtctttgcggctttaactatcgctttaacagcttttaccgagatcagcctcatccatttattacaagttatgtccgtgcactggatgaatatatgaacaagctgcagcgagcaaatccagacgacccagcttatgatgaaaacaagcgccagtttcaagaagatatcaaggtgatgaacgacctagtagataaaattattgcagatcgcaaagcaagcggtgaacaaagcgatgatttattaacgcatatgctaaacggaaaagatccagaaacgggtgagccgcttgatgacgagaacattcgctatcaaattattacattcttaattgcgggacacgaaacaacaagtggtcttttatcatttgcgctgtatttcttagtgaaaaatccacatgtattacaaaaagcagcagaagaagcagcacgagttctagtagatcctgttccaagctacaaacaagtcaaacagcttaaatatgtcggcatggtcttaaacgaagcgctgcgcttatggccaactgctcctgcgttttccctatatgcaaaagaagatacggtgcttggaggagaatatcctttagaaaaaggcgacgaactaatggttctgattcctcagcttcaccgtgataaaacaatttggggagacgatgtggaagagttccgtccagagcgttttgaaaatccaagtgcgattccgcagcatgcgtttaaaccgtttggaaacggtcagcgtgcgtgtatcggtcagcagttcgctcttcatgaagcaacgctggtacttggtatgatgctaaaacactttgactttgaagatcatacaaactacgagctggatattaaagaaactttaacgttaaaacctgaaggctttgtggtaaaagcaaaatcgaaaaaaattccgcttggcggtattccttcacctagcactgaacagtctgctaaaaaagtacgcaaaaaggcagaaaacgctcataatacgccgctgcttgtgctatacggttcaaatatgggaacagctgaaggaacggcgcgtgatttagcagatattgcaatgagcaaaggatttgcaccgcaggtcgcaacgcttgattcacacgccggaaatcttccgcgcgaaggagctgtattaattgtaacggcgtcttataacggtcatccgcctgataacgcaaagcaatttgtcgactggttagaccaagcgtctgctgatgaagtaaaaggcgttcgctactccgtatttggatgcggcgataaaaactgggctactacgtatcaaaaagtgcctgcttttatcgatgaaacgcttgccgctaaaggggcagaaaacatcgctgaccgcggtgaagcagatgcaagcgacgactttgaaggcacatatgaagaatggcgtgaacatatgtggagtgacgtagcagcctactttaacctcgacattgaaaacagtgaagataataaatctactctttcacttcaatttgtcgacagcgccgcggatatgccgcttgcgaaaatgcacggtgcgttttcaacgaacgtcgtagcaagcaaagaacttcaacagccaggcagtgcacgaagcacgcgacatcttgaaattgaacttccaaaagaagcttcttatcaagaaggagatcatttaggtgttattcctcgcaactatgaaggaatagtaaaccgtgtaacagcaaggttcggcctagatgcatcacagcaaatccgtctggaagcagaagaagaaaaattagctcatttgccactcgctaaaacagtatccgtagaagagcttctgcaatacgtggagcttcaagatcctgttacgcgcacgcagcttcgcgcaatggctgctaaaacggtctgcccgccgcataaagtagagcttgaagccttgcttgaaaagcaagcctacaaagaacaagtgctggcaaaacgtttaacaatgcttgaactgcttgaaaaatacccggcgtgtgaaatgaaattcagcgaatttatcgcccttctgccaagcatacgcccgcgctattactcgatttcttcatcacctcgtgtcgatgaaaaacaagcaagcatcacggtcagcgttgtctcaggagaagcgtggagcggatatggagaatataaaggaattgcgtcgaactatcttgccgagctgcaagaaggagatacgattacgtgctttatttccacaccgcagtcagaatttacgctgccaaaagaccctgaaacgccgcttatcatggtcggaccgggaacaggcgtcgcgccgtttagaggctttgtgcaggcgcgcaaacagctaaaagaacaaggacagtcacttggagaagcacatttatacttcggctgccgttcacctcatgaagactatctgtatcaagaagagcttgaaaacgcccaaagcgaaggcatcattacgcttcataccgctttttctcgcatgccaaatcagccgaaaacatacgttcagcacgtaatggaacaagacggcaagaaattgattgaacttcttgatcaaggagcgcacttctatatttgcggagacggaagccaaatggcacctgccgttgaagcaacgcttatgaaaagctatgctgacgttcaccaagtgagtgaagcagacgctcgcttatggctgcagcagctagaagaaaaaggccgatacgcaaaagacgtgtgggctgggtaa

SEQ ID NO: 85 - DNA, 3228 bp, Artificial Sequence
  BM3 variant (V78M, A82Q, F87A, M177Y, A184Y)
atgaaacatcaccatcaccatcaccccatgagcgattacgacatccccactactgagaatctttattttcagggcgccatggcaattaaagaaatgcctcagccaaaaacgtttggagagcttaaaaatttaccgttattaaacacagataaaccggttcaagctttgatgaaaattgcggatgaattaggagaaatctttaaattcgaggcgcctggtcgtgtaacgcgctacttatcaagtcagcgtctaattaaagaagcatgcgatgaatcacgctttgataaaaacttaagtcaagcgcttaaatttatgcgtgattttcagggagacgggttagcaacaagctggacgcatgaaaaaaattggaaaaaagcgcataatatcttacttccaagcttcagtcagcaggcaatgaaaggctatcatgcgatgatggtcgatatcgccgtgcagcttgttcaaaagtgggagcgtctaaatgcagatgagcatattgaagtaccggaagacatgacacgtttaacgcttgatacaattggtctttgcggctttaactatcgctttaacagcttttaccgagatcagcctcatccatttattacaagttatgtccgtgcactggatgaatatatgaacaagctgcagcgagcaaatccagacgacccagcttatgatgaaaacaagcgccagtttcaagaagatatcaaggtgatgaacgacctagtagataaaattattgcagatcgcaaagcaagcggtgaacaaagcgatgatttattaacgcatatgctaaacggaaaagatccagaaacgggtgagccgcttgatgacgagaacattcgctatcaaattattacattcttaattgcgggacacgaaacaacaagtggtcttttatcatttgcgctgtatttcttagtgaaaaatccacatgtattacaaaaagcagcagaagaagcagcacgagttctagtagatcctgttccaagctacaaacaagtcaaacagcttaaatatgtcggcatggtcttaaacgaagcgctgcgcttatggccaactgctcctgcgttttccctatatgcaaaagaagatacggtgcttggaggagaatatcctttagaaaaaggcgacgaactaatggttctgattcctcagcttcaccgtgataaaacaatttggggagacgatgtggaagagttccgtccagagcgttttgaaaatccaagtgcgattccgcagcatgcgtttaaaccgtttggaaacggtcagcgtgcgtgtatcggtcagcagttcgctcttcatgaagcaacgctggtacttggtatgatgctaaaacactttgactttgaagatcatacaaactacgagctggatattaaagaaactttaacgttaaaacctgaaggctttgtggtaaaagcaaaatcgaaaaaaattccgcttggcggtattccttcacctagcactgaacagtctgctaaaaaagtacgcaaaaaggcagaaaacgctcataatacgccgctgcttgtgctatacggttcaaatatgggaacagctgaaggaacggcgcgtgatttagcagatattgcaatgagcaaaggatttgcaccgcaggtcgcaacgcttgattcacacgccggaaatcttccgcgcgaaggagctgtattaattgtaacggcgtcttataacggtcatccgcctgataacgcaaagcaatttgtcgactggttagaccaagcgtctgctgatgaagtaaaaggcgttcgctactccgtatttggatgcggcgataaaaactgggctactacgtatcaaaaagtgcctgcttttatcgatgaaacgcttgccgctaaaggggcagaaaacatcgctgaccgcggtgaagcagatgcaagcgacgactttgaaggcacatatgaagaatggcgtgaacatatgtggagtgacgtagcagcctactttaacctcgacattgaaaacagtgaagataataaatctactctttcacttcaatttgtcgacagcgccgcggatatgccgcttgcgaaaatgcacggtgcgttttcaacgaacgtcgtagcaagcaaagaacttcaacagccaggcagtgcacgaagcacgcgacatcttgaaattgaacttccaaaagaagcttcttatcaagaaggagatcatttaggtgttattcctcgcaactatgaaggaatagtaaaccgtgtaacagcaaggttcggcctagatgcatcacagcaaatccgtctggaagcagaagaagaaaaattagctcatttgccactcgctaaaacagtatccgtagaagagcttctgcaatacgtggagcttcaagatcctgttacgcgcacgcagcttcgcgcaatggctgctaaaacggtctgcccgccgcataaagtagagcttgaagccttgcttgaaaagcaagcctacaaagaacaagtgctggcaaaacgtttaacaatgcttgaactgcttgaaaaatacccggcgtgtgaaatgaaattcagcgaatttatcgcccttctgccaagcatacgcccgcgctattactcgatttcttcatcacctcgtgtcgatgaaaaacaagcaagcatcacggtcagcgttgtctcaggagaagcgtggagcggatatggagaatataaaggaattgcgtcgaactatcttgccgagctgcaagaaggagatacgattacgtgctttatttccacaccgcagtcagaatttacgctgccaaaagaccctgaaacgccgcttatcatggtcggaccgggaacaggcgtcgcgccgtttagaggctttgtgcaggcgcgcaaacagctaaaagaacaaggacagtcacttggagaagcacatttatacttcggctgccgttcacctcatgaagactatctgtatcaagaagagcttgaaaacgcccaaagcgaaggcatcattacgcttcataccgctttttctcgcatgccaaatcagccgaaaacatacgttcagcacgtaatggaacaagacggcaagaaattgattgaacttcttgatcaaggagcgcacttctatatttgcggagacggaagccaaatggcacctgccgttgaagcaacgcttatgaaaagctatgctgacgttcaccaagtgagtgaagcagacgctcgcttatggctgcagcagctagaagaaaaaggccgatacgcaaaagacgtgtgggctgggtaa

SEQ ID NO: 86 - DNA, 3228 bp, Artificial Sequence
  BM3 variant (V78Y, A82Q, F87A, M177Y, A184Y)
atgaaacatcaccatcaccatcaccccatgagcgattacgacatccccactactgagaatctttattttcagggcgccatggcaattaaagaaatgcctcagccaaaaacgtttggagagcttaaaaatttaccgttattaaacacagataaaccggttcaagctttgatgaaaattgcggatgaattaggagaaatctttaaattcgaggcgcctggtcgtgtaacgcgctacttatcaagtcagcgtctaattaaagaagcatgcgatgaatcacgctttgataaaaacttaagtcaagcgcttaaattttatcgtgattttcagggagacgggttagcaacaagctggacgcatgaaaaaaattggaaaaaagcgcataatatcttacttccaagcttcagtcagcaggcaatgaaaggctatcatgcgatgatggtcgatatcgccgtgcagcttgttcaaaagtgggagcgtctaaatgcagatgagcatattgaagtaccggaagacatgacacgtttaacgcttgatacaattggtctttgcggctttaactatcgctttaacagcttttaccgagatcagcctcatccatttattacaagttatgtccgtgcactggatgaatatatgaacaagctgcagcgagcaaatccagacgacccagcttatgatgaaaacaagcgccagtttcaagaagatatcaaggtgatgaacgacctagtagataaaattattgcagatcgcaaagcaagcggtgaacaaagcgatgatttattaacgcatatgctaaacggaaaagatccagaaacgggtgagccgcttgatgacgagaacattcgctatcaaattattacattcttaattgcgggacacgaaacaacaagtggtcttttatcatttgcgctgtatttcttagtgaaaaatccacatgtattacaaaaagcagcagaagaagcagcacgagttctagtagatcctgttccaagctacaaacaagtcaaacagcttaaatatgtcggcatggtcttaaacgaagcgctgcgcttatggccaactgctcctgcgttttccctatatgcaaaagaagatacggtgcttggaggagaatatcctttagaaaaaggcgacgaactaatggttctgattcctcagcttcaccgtgataaaacaatttggggagacgatgtggaagagttccgtccagagcgttttgaaaatccaagtgcgattccgcagcatgcgtttaaaccgtttggaaacggtcagcgtgcgtgtatcggtcagcagttcgctcttcatgaagcaacgctggtacttggtatgatgctaaaacactttgactttgaagatcatacaaactacgagctggatattaaagaaactttaacgttaaaacctgaaggctttgtggtaaaagcaaaatcgaaaaaaattccgcttggcggtattccttcacctagcactgaacagtctgctaaaaaagtacgcaaaaaggcagaaaacgctcataatacgccgctgcttgtgctatacggttcaaatatgggaacagctgaaggaacggcgcgtgatttagcagatattgcaatgagcaaaggatttgcaccgcaggtcgcaacgcttgattcacacgccggaaatcttccgcgcgaaggagctgtattaattgtaacggcgtcttataacggtcatccgcctgataacgcaaagcaatttgtcgactggttagaccaagcgtctgctgatgaagtaaaaggcgttcgctactccgtatttggatgcggcgataaaaactgggctactacgtatcaaaaagtgcctgcttttatcgatgaaacgcttgccgctaaaggggcagaaaacatcgctgaccgcggtgaagcagatgcaagcgacgactttgaaggcacatatgaagaatggcgtgaacatatgtggagtgacgtagcagcctactttaacctcgacattgaaaacagtgaagataataaatctactctttcacttcaatttgtcgacagcgccgcggatatgccgcttgcgaaaatgcacggtgcgttttcaacgaacgtcgtagcaagcaaagaacttcaacagccaggcagtgcacgaagcacgcgacatcttgaaattgaacttccaaaagaagcttcttatcaagaaggagatcatttaggtgttattcctcgcaactatgaaggaatagtaaaccgtgtaacagcaaggttcggcctagatgcatcacagcaaatccgtctggaagcagaagaagaaaaattagctcatttgccactcgctaaaacagtatccgtagaagagcttctgcaatacgtggagcttcaagatcctgttacgcgcacgcagcttcgcgcaatggctgctaaaacggtctgcccgccgcataaagtagagcttgaagccttgcttgaaaagcaagcctacaaagaacaagtgctggcaaaacgtttaacaatgcttgaactgcttgaaaaatacccggcgtgtgaaatgaaattcagcgaatttatcgcccttctgccaagcatacgcccgcgctattactcgatttcttcatcacctcgtgtcgatgaaaaacaagcaagcatcacggtcagcgttgtctcaggagaagcgtggagcggatatggagaatataaaggaattgcgtcgaactatcttgccgagctgcaagaaggagatacgattacgtgctttatttccacaccgcagtcagaatttacgctgccaaaagaccctgaaacgccgcttatcatggtcggaccgggaacaggcgtcgcgccgtttagaggctttgtgcaggcgcgcaaacagctaaaagaacaaggacagtcacttggagaagcacatttatacttcggctgccgttcacctcatgaagactatctgtatcaagaagagcttgaaaacgcccaaagcgaaggcatcattacgcttcataccgctttttctcgcatgccaaatcagccgaaaacatacgttcagcacgtaatggaacaagacggcaagaaattgattgaacttcttgatcaaggagcgcacttctatatttgcggagacggaagccaaatggcacctgccgttgaagcaacgcttatgaaaagctatgctgacgttcaccaagtgagtgaagcagacgctcgcttatggctgcagcagctagaagaaaaaggccgatacgcaaaagacgtgtgggctgggtaa

SEQ ID NO: 87 - DNA, 3228 bp, Artificial Sequence
  BM3 variant (V78F, A82E, F87A, M177Y)
atgaaacatcaccatcaccatcaccccatgagcgattacgacatccccactactgagaatctttattttcagggcgccatggcaattaaagaaatgcctcagccaaaaacgtttggagagcttaaaaatttaccgttattaaacacagataaaccggttcaagctttgatgaaaattgcggatgaattaggagaaatctttaaattcgaggcgcctggtcgtgtaacgcgctacttatcaagtcagcgtctaattaaagaagcatgcgatgaatcacgctttgataaaaacttaagtcaagcgcttaaattttttcgtgattttgagggagacgggttagcaacaagctggacgcatgaaaaaaattggaaaaaagcgcataatatcttacttccaagcttcagtcagcaggcaatgaaaggctatcatgcgatgatggtcgatatcgccgtgcagcttgttcaaaagtgggagcgtctaaatgcagatgagcatattgaagtaccggaagacatgacacgtttaacgcttgatacaattggtctttgcggctttaactatcgctttaacagcttttaccgagatcagcctcatccatttattacaagttacgtccgtgcactggatgaagcaatgaacaagctgcagcgagcaaatccagacgacccagcttatgatgaaaacaagcgccagtttcaagaagatatcaaggtgatgaacgacctagtagataaaattattgcagatcgcaaagcaagcggtgaacaaagcgatgatttattaacgcatatgctaaacggaaaagatccagaaacgggtgagccgcttgatgacgagaacattcgctatcaaattattacattcttaattgcgggacacgaaacaacaagtggtcttttatcatttgcgctgtatttcttagtgaaaaatccacatgtattacaaaaagcagcagaagaagcagcacgagttctagtagatcctgttccaagctacaaacaagtcaaacagcttaaatatgtcggcatggtcttaaacgaagcgctgcgcttatggccaactgctcctgcgttttccctatatgcaaaagaagatacggtgcttggaggagaatatcctttagaaaaaggcgacgaactaatggttctgattcctcagcttcaccgtgataaaacaatttggggagacgatgtggaagagttccgtccagagcgttttgaaaatccaagtgcgattccgcagcatgcgtttaaaccgtttggaaacggtcagcgtgcgtgtatcggtcagcagttcgctcttcatgaagcaacgctggtacttggtatgatgctaaaacactttgactttgaagatcatacaaactacgagctggatattaaagaaactttaacgttaaaacctgaaggctttgtggtaaaagcaaaatcgaaaaaaattccgcttggcggtattccttcacctagcactgaacagtctgctaaaaaagtacgcaaaaaggcagaaaacgctcataatacgccgctgcttgtgctatacggttcaaatatgggaacagctgaaggaacggcgcgtgatttagcagatattgcaatgagcaaaggatttgcaccgcaggtcgcaacgcttgattcacacgccggaaatcttccgcgcgaaggagctgtattaattgtaacggcgtcttataacggtcatccgcctgataacgcaaagcaatttgtcgactggttagaccaagcgtctgctgatgaagtaaaaggcgttcgctactccgtatttggatgcggcgataaaaactgggctactacgtatcaaaaagtgcctgcttttatcgatgaaacgcttgccgctaaaggggcagaaaacatcgctgaccgcggtgaagcagatgcaagcgacgactttgaaggcacatatgaagaatggcgtgaacatatgtggagtgacgtagcagcctactttaacctcgacattgaaaacagtgaagataataaatctactctttcacttcaatttgtcgacagcgccgcggatatgccgcttgcgaaaatgcacggtgcgttttcaacgaacgtcgtagcaagcaaagaacttcaacagccaggcagtgcacgaagcacgcgacatcttgaaattgaacttccaaaagaagcttcttatcaagaaggagatcatttaggtgttattcctcgcaactatgaaggaatagtaaaccgtgtaacagcaaggttcggcctagatgcatcacagcaaatccgtctggaagcagaagaagaaaaattagctcatttgccactcgctaaaacagtatccgtagaagagcttctgcaatacgtggagcttcaagatcctgttacgcgcacgcagcttcgcgcaatggctgctaaaacggtctgcccgccgcataaagtagagcttgaagccttgcttgaaaagcaagcctacaaagaacaagtgctggcaaaacgtttaacaatgcttgaactgcttgaaaaatacccggcgtgtgaaatgaaattcagcgaatttatcgcccttctgccaagcatacgcccgcgctattactcgatttcttcatcacctcgtgtcgatgaaaaacaagcaagcatcacggtcagcgttgtctcaggagaagcgtggagcggatatggagaatataaaggaattgcgtcgaactatcttgccgagctgcaagaaggagatacgattacgtgctttatttccacaccgcagtcagaatttacgctgccaaaagaccctgaaacgccgcttatcatggtcggaccgggaacaggcgtcgcgccgtttagaggctttgtgcaggcgcgcaaacagctaaaagaacaaggacagtcacttggagaagcacatttatacttcggctgccgttcacctcatgaagactatctgtatcaagaagagcttgaaaacgcccaaagcgaaggcatcattacgcttcataccgctttttctcgcatgccaaatcagccgaaaacatacgttcagcacgtaatggaacaagacggcaagaaattgattgaacttcttgatcaaggagcgcacttctatatttgcggagacggaagccaaatggcacctgccgttgaagcaacgcttatgaaaagctatgctgacgttcaccaagtgagtgaagcagacgctcgcttatggctgcagcagctagaagaaaaaggccgatacgcaaaagacgtgtgggctgggtaa

SEQ ID NO: 88 - DNA, 3228 bp, Artificial Sequence
  BM3 variant (V78L, A82E, F87A, M177Y)
atgaaacatcaccatcaccatcaccccatgagcgattacgacatccccactactgagaatctttattttcagggcgccatggcaattaaagaaatgcctcagccaaaaacgtttggagagcttaaaaatttaccgttattaaacacagataaaccggttcaagctttgatgaaaattgcggatgaattaggagaaatctttaaattcgaggcgcctggtcgtgtaacgcgctacttatcaagtcagcgtctaattaaagaagcatgcgatgaatcacgctttgataaaaacttaagtcaagcgcttaaatttctgcgtgattttgagggagacgggttagcaacaagctggacgcatgaaaaaaattggaaaaaagcgcataatatcttacttccaagcttcagtcagcaggcaatgaaaggctatcatgcgatgatggtcgatatcgccgtgcagcttgttcaaaagtgggagcgtctaaatgcagatgagcatattgaagtaccggaagacatgacacgtttaacgcttgatacaattggtctttgcggctttaactatcgctttaacagcttttaccgagatcagcctcatccatttattacaagttacgtccgtgcactggatgaagcaatgaacaagctgcagcgagcaaatccagacgacccagcttatgatgaaaacaagcgccagtttcaagaagatatcaaggtgatgaacgacctagtagataaaattattgcagatcgcaaagcaagcggtgaacaaagcgatgatttattaacgcatatgctaaacggaaaagatccagaaacgggtgagccgcttgatgacgagaacattcgctatcaaattattacattcttaattgcgggacacgaaacaacaagtggtcttttatcatttgcgctgtatttcttagtgaaaaatccacatgtattacaaaaagcagcagaagaagcagcacgagttctagtagatcctgttccaagctacaaacaagtcaaacagcttaaatatgtcggcatggtcttaaacgaagcgctgcgcttatggccaactgctcctgcgttttccctatatgcaaaagaagatacggtgcttggaggagaatatcctttagaaaaaggcgacgaactaatggttctgattcctcagcttcaccgtgataaaacaatttggggagacgatgtggaagagttccgtccagagcgttttgaaaatccaagtgcgattccgcagcatgcgtttaaaccgtttggaaacggtcagcgtgcgtgtatcggtcagcagttcgctcttcatgaagcaacgctggtacttggtatgatgctaaaacactttgactttgaagatcatacaaactacgagctggatattaaagaaactttaacgttaaaacctgaaggctttgtggtaaaagcaaaatcgaaaaaaattccgcttggcggtattccttcacctagcactgaacagtctgctaaaaaagtacgcaaaaaggcagaaaacgctcataatacgccgctgcttgtgctatacggttcaaatatgggaacagctgaaggaacggcgcgtgatttagcagatattgcaatgagcaaaggatttgcaccgcaggtcgcaacgcttgattcacacgccggaaatcttccgcgcgaaggagctgtattaattgtaacggcgtcttataacggtcatccgcctgataacgcaaagcaatttgtcgactggttagaccaagcgtctgctgatgaagtaaaaggcgttcgctactccgtatttggatgcggcgataaaaactgggctactacgtatcaaaaagtgcctgcttttatcgatgaaacgcttgccgctaaaggggcagaaaacatcgctgaccgcggtgaagcagatgcaagcgacgactttgaaggcacatatgaagaatggcgtgaacatatgtggagtgacgtagcagcctactttaacctcgacattgaaaacagtgaagataataaatctactctttcacttcaatttgtcgacagcgccgcggatatgccgcttgcgaaaatgcacggtgcgttttcaacgaacgtcgtagcaagcaaagaacttcaacagccaggcagtgcacgaagcacgcgacatcttgaaattgaacttccaaaagaagcttcttatcaagaaggagatcatttaggtgttattcctcgcaactatgaaggaatagtaaaccgtgtaacagcaaggttcggcctagatgcatcacagcaaatccgtctggaagcagaagaagaaaaattagctcatttgccactcgctaaaacagtatccgtagaagagcttctgcaatacgtggagcttcaagatcctgttacgcgcacgcagcttcgcgcaatggctgctaaaacggtctgcccgccgcataaagtagagcttgaagccttgcttgaaaagcaagcctacaaagaacaagtgctggcaaaacgtttaacaatgcttgaactgcttgaaaaatacccggcgtgtgaaatgaaattcagcgaatttatcgcccttctgccaagcatacgcccgcgctattactcgatttcttcatcacctcgtgtcgatgaaaaacaagcaagcatcacggtcagcgttgtctcaggagaagcgtggagcggatatggagaatataaaggaattgcgtcgaactatcttgccgagctgcaagaaggagatacgattacgtgctttatttccacaccgcagtcagaatttacgctgccaaaagaccctgaaacgccgcttatcatggtcggaccgggaacaggcgtcgcgccgtttagaggctttgtgcaggcgcgcaaacagctaaaagaacaaggacagtcacttggagaagcacatttatacttcggctgccgttcacctcatgaagactatctgtatcaagaagagcttgaaaacgcccaaagcgaaggcatcattacgcttcataccgctttttctcgcatgccaaatcagccgaaaacatacgttcagcacgtaatggaacaagacggcaagaaattgattgaacttcttgatcaaggagcgcacttctatatttgcggagacggaagccaaatggcacctgccgttgaagcaacgcttatgaaaagctatgctgacgttcaccaagtgagtgaagcagacgctcgcttatggctgcagcagctagaagaaaaaggccgatacgcaaaagacgtgtgggctgggtaa

SEQ ID NO: 89 - DNA, 3228 bp, Artificial Sequence
  BM3 variant (V78I, A82E, F87A, M177Y)
atgaaacatcaccatcaccatcaccccatgagcgattacgacatccccactactgagaatctttattttcagggcgccatggcaattaaagaaatgcctcagccaaaaacgtttggagagcttaaaaatttaccgttattaaacacagataaaccggttcaagctttgatgaaaattgcggatgaattaggagaaatctttaaattcgaggcgcctggtcgtgtaacgcgctacttatcaagtcagcgtctaattaaagaagcatgcgatgaatcacgctttgataaaaacttaagtcaagcgcttaaatttattcgtgattttgagggagacgggttagcaacaagctggacgcatgaaaaaaattggaaaaaagcgcataatatcttacttccaagcttcagtcagcaggcaatgaaaggctatcatgcgatgatggtcgatatcgccgtgcagcttgttcaaaagtgggagcgtctaaatgcagatgagcatattgaagtaccggaagacatgacacgtttaacgcttgatacaattggtctttgcggctttaactatcgctttaacagcttttaccgagatcagcctcatccatttattacaagttacgtccgtgcactggatgaagcaatgaacaagctgcagcgagcaaatccagacgacccagcttatgatgaaaacaagcgccagtttcaagaagatatcaaggtgatgaacgacctagtagataaaattattgcagatcgcaaagcaagcggtgaacaaagcgatgatttattaacgcatatgctaaacggaaaagatccagaaacgggtgagccgcttgatgacgagaacattcgctatcaaattattacattcttaattgcgggacacgaaacaacaagtggtcttttatcatttgcgctgtatttcttagtgaaaaatccacatgtattacaaaaagcagcagaagaagcagcacgagttctagtagatcctgttccaagctacaaacaagtcaaacagcttaaatatgtcggcatggtcttaaacgaagcgctgcgcttatggccaactgctcctgcgttttccctatatgcaaaagaagatacggtgcttggaggagaatatcctttagaaaaaggcgacgaactaatggttctgattcctcagcttcaccgtgataaaacaatttggggagacgatgtggaagagttccgtccagagcgttttgaaaatccaagtgcgattccgcagcatgcgtttaaaccgtttggaaacggtcagcgtgcgtgtatcggtcagcagttcgctcttcatgaagcaacgctggtacttggtatgatgctaaaacactttgactttgaagatcatacaaactacgagctggatattaaagaaactttaacgttaaaacctgaaggctttgtggtaaaagcaaaatcgaaaaaaattccgcttggcggtattccttcacctagcactgaacagtctgctaaaaaagtacgcaaaaaggcagaaaacgctcataatacgccgctgcttgtgctatacggttcaaatatgggaacagctgaaggaacggcgcgtgatttagcagatattgcaatgagcaaaggatttgcaccgcaggtcgcaacgcttgattcacacgccggaaatcttccgcgcgaaggagctgtattaattgtaacggcgtcttataacggtcatccgcctgataacgcaaagcaatttgtcgactggttagaccaagcgtctgctgatgaagtaaaaggcgttcgctactccgtatttggatgcggcgataaaaactgggctactacgtatcaaaaagtgcctgcttttatcgatgaaacgcttgccgctaaaggggcagaaaacatcgctgaccgcggtgaagcagatgcaagcgacgactttgaaggcacatatgaagaatggcgtgaacatatgtggagtgacgtagcagcctactttaacctcgacattgaaaacagtgaagataataaatctactctttcacttcaatttgtcgacagcgccgcggatatgccgcttgcgaaaatgcacggtgcgttttcaacgaacgtcgtagcaagcaaagaacttcaacagccaggcagtgcacgaagcacgcgacatcttgaaattgaacttccaaaagaagcttcttatcaagaaggagatcatttaggtgttattcctcgcaactatgaaggaatagtaaaccgtgtaacagcaaggttcggcctagatgcatcacagcaaatccgtctggaagcagaagaagaaaaattagctcatttgccactcgctaaaacagtatccgtagaagagcttctgcaatacgtggagcttcaagatcctgttacgcgcacgcagcttcgcgcaatggctgctaaaacggtctgcccgccgcataaagtagagcttgaagccttgcttgaaaagcaagcctacaaagaacaagtgctggcaaaacgtttaacaatgcttgaactgcttgaaaaatacccggcgtgtgaaatgaaattcagcgaatttatcgcccttctgccaagcatacgcccgcgctattactcgatttcttcatcacctcgtgtcgatgaaaaacaagcaagcatcacggtcagcgttgtctcaggagaagcgtggagcggatatggagaatataaaggaattgcgtcgaactatcttgccgagctgcaagaaggagatacgattacgtgctttatttccacaccgcagtcagaatttacgctgccaaaagaccctgaaacgccgcttatcatggtcggaccgggaacaggcgtcgcgccgtttagaggctttgtgcaggcgcgcaaacagctaaaagaacaaggacagtcacttggagaagcacatttatacttcggctgccgttcacctcatgaagactatctgtatcaagaagagcttgaaaacgcccaaagcgaaggcatcattacgcttcataccgctttttctcgcatgccaaatcagccgaaaacatacgttcagcacgtaatggaacaagacggcaagaaattgattgaacttcttgatcaaggagcgcacttctatatttgcggagacggaagccaaatggcacctgccgttgaagcaacgcttatgaaaagctatgctgacgttcaccaagtgagtgaagcagacgctcgcttatggctgcagcagctagaagaaaaaggccgatacgcaaaagacgtgtgggctgggtaa

SEQ ID NO: 90 - DNA, 3228 bp, Artificial Sequence
  BM3 variant (V78M, A82E, F87A, M177Y)
atgaaacatcaccatcaccatcaccccatgagcgattacgacatccccactactgagaatctttattttcagggcgccatggcaattaaagaaatgcctcagccaaaaacgtttggagagcttaaaaatttaccgttattaaacacagataaaccggttcaagctttgatgaaaattgcggatgaattaggagaaatctttaaattcgaggcgcctggtcgtgtaacgcgctacttatcaagtcagcgtctaattaaagaagcatgcgatgaatcacgctttgataaaaacttaagtcaagcgcttaaatttatgcgtgattttgagggagacgggttagcaacaagctggacgcatgaaaaaaattggaaaaaagcgcataatatcttacttccaagcttcagtcagcaggcaatgaaaggctatcatgcgatgatggtcgatatcgccgtgcagcttgttcaaaagtgggagcgtctaaatgcagatgagcatattgaagtaccggaagacatgacacgtttaacgcttgatacaattggtctttgcggctttaactatcgctttaacagcttttaccgagatcagcctcatccatttattacaagttacgtccgtgcactggatgaagcaatgaacaagctgcagcgagcaaatccagacgacccagcttatgatgaaaacaagcgccagtttcaagaagatatcaaggtgatgaacgacctagtagataaaattattgcagatcgcaaagcaagcggtgaacaaagcgatgatttattaacgcatatgctaaacggaaaagatccagaaacgggtgagccgcttgatgacgagaacattcgctatcaaattattacattcttaattgcgggacacgaaacaacaagtggtcttttatcatttgcgctgtatttcttagtgaaaaatccacatgtattacaaaaagcagcagaagaagcagcacgagttctagtagatcctgttccaagctacaaacaagtcaaacagcttaaatatgtcggcatggtcttaaacgaagcgctgcgcttatggccaactgctcctgcgttttccctatatgcaaaagaagatacggtgcttggaggagaatatcctttagaaaaaggcgacgaactaatggttctgattcctcagcttcaccgtgataaaacaatttggggagacgatgtggaagagttccgtccagagcgttttgaaaatccaagtgcgattccgcagcatgcgtttaaaccgtttggaaacggtcagcgtgcgtgtatcggtcagcagttcgctcttcatgaagcaacgctggtacttggtatgatgctaaaacactttgactttgaagatcatacaaactacgagctggatattaaagaaactttaacgttaaaacctgaaggctttgtggtaaaagcaaaatcgaaaaaaattccgcttggcggtattccttcacctagcactgaacagtctgctaaaaaagtacgcaaaaaggcagaaaacgctcataatacgccgctgcttgtgctatacggttcaaatatgggaacagctgaaggaacggcgcgtgatttagcagatattgcaatgagcaaaggatttgcaccgcaggtcgcaacgcttgattcacacgccggaaatcttccgcgcgaaggagctgtattaattgtaacggcgtcttataacggtcatccgcctgataacgcaaagcaatttgtcgactggttagaccaagcgtctgctgatgaagtaaaaggcgttcgctactccgtatttggatgcggcgataaaaactgggctactacgtatcaaaaagtgcctgcttttatcgatgaaacgcttgccgctaaaggggcagaaaacatcgctgaccgcggtgaagcagatgcaagcgacgactttgaaggcacatatgaagaatggcgtgaacatatgtggagtgacgtagcagcctactttaacctcgacattgaaaacagtgaagataataaatctactctttcacttcaatttgtcgacagcgccgcggatatgccgcttgcgaaaatgcacggtgcgttttcaacgaacgtcgtagcaagcaaagaacttcaacagccaggcagtgcacgaagcacgcgacatcttgaaattgaacttccaaaagaagcttcttatcaagaaggagatcatttaggtgttattcctcgcaactatgaaggaatagtaaaccgtgtaacagcaaggttcggcctagatgcatcacagcaaatccgtctggaagcagaagaagaaaaattagctcatttgccactcgctaaaacagtatccgtagaagagcttctgcaatacgtggagcttcaagatcctgttacgcgcacgcagcttcgcgcaatggctgctaaaacggtctgcccgccgcataaagtagagcttgaagccttgcttgaaaagcaagcctacaaagaacaagtgctggcaaaacgtttaacaatgcttgaactgcttgaaaaatacccggcgtgtgaaatgaaattcagcgaatttatcgcccttctgccaagcatacgcccgcgctattactcgatttcttcatcacctcgtgtcgatgaaaaacaagcaagcatcacggtcagcgttgtctcaggagaagcgtggagcggatatggagaatataaaggaattgcgtcgaactatcttgccgagctgcaagaaggagatacgattacgtgctttatttccacaccgcagtcagaatttacgctgccaaaagaccctgaaacgccgcttatcatggtcggaccgggaacaggcgtcgcgccgtttagaggctttgtgcaggcgcgcaaacagctaaaagaacaaggacagtcacttggagaagcacatttatacttcggctgccgttcacctcatgaagactatctgtatcaagaagagcttgaaaacgcccaaagcgaaggcatcattacgcttcataccgctttttctcgcatgccaaatcagccgaaaacatacgttcagcacgtaatggaacaagacggcaagaaattgattgaacttcttgatcaaggagcgcacttctatatttgcggagacggaagccaaatggcacctgccgttgaagcaacgcttatgaaaagctatgctgacgttcaccaagtgagtgaagcagacgctcgcttatggctgcagcagctagaagaaaaaggccgatacgcaaaagacgtgtgggctgggtaa

SEQ ID NO: 91 - DNA, 3228 bp, Artificial Sequence
  BM3 variant (V78Y, A82E, F87A, M177Y)
atgaaacatcaccatcaccatcaccccatgagcgattacgacatccccactactgagaatctttattttcagggcgccatggcaattaaagaaatgcctcagccaaaaacgtttggagagcttaaaaatttaccgttattaaacacagataaaccggttcaagctttgatgaaaattgcggatgaattaggagaaatctttaaattcgaggcgcctggtcgtgtaacgcgctacttatcaagtcagcgtctaattaaagaagcatgcgatgaatcacgctttgataaaaacttaagtcaagcgcttaaattttatcgtgattttgagggagacgggttagcaacaagctggacgcatgaaaaaaattggaaaaaagcgcataatatcttacttccaagcttcagtcagcaggcaatgaaaggctatcatgcgatgatggtcgatatcgccgtgcagcttgttcaaaagtgggagcgtctaaatgcagatgagcatattgaagtaccggaagacatgacacgtttaacgcttgatacaattggtctttgcggctttaactatcgctttaacagcttttaccgagatcagcctcatccatttattacaagttacgtccgtgcactggatgaagcaatgaacaagctgcagcgagcaaatccagacgacccagcttatgatgaaaacaagcgccagtttcaagaagatatcaaggtgatgaacgacctagtagataaaattattgcagatcgcaaagcaagcggtgaacaaagcgatgatttattaacgcatatgctaaacggaaaagatccagaaacgggtgagccgcttgatgacgagaacattcgctatcaaattattacattcttaattgcgggacacgaaacaacaagtggtcttttatcatttgcgctgtatttcttagtgaaaaatccacatgtattacaaaaagcagcagaagaagcagcacgagttctagtagatcctgttccaagctacaaacaagtcaaacagcttaaatatgtcggcatggtcttaaacgaagcgctgcgcttatggccaactgctcctgcgttttccctatatgcaaaagaagatacggtgcttggaggagaatatcctttagaaaaaggcgacgaactaatggttctgattcctcagcttcaccgtgataaaacaatttggggagacgatgtggaagagttccgtccagagcgttttgaaaatccaagtgcgattccgcagcatgcgtttaaaccgtttggaaacggtcagcgtgcgtgtatcggtcagcagttcgctcttcatgaagcaacgctggtacttggtatgatgctaaaacactttgactttgaagatcatacaaactacgagctggatattaaagaaactttaacgttaaaacctgaaggctttgtggtaaaagcaaaatcgaaaaaaattccgcttggcggtattccttcacctagcactgaacagtctgctaaaaaagtacgcaaaaaggcagaaaacgctcataatacgccgctgcttgtgctatacggttcaaatatgggaacagctgaaggaacggcgcgtgatttagcagatattgcaatgagcaaaggatttgcaccgcaggtcgcaacgcttgattcacacgccggaaatcttccgcgcgaaggagctgtattaattgtaacggcgtcttataacggtcatccgcctgataacgcaaagcaatttgtcgactggttagaccaagcgtctgctgatgaagtaaaaggcgttcgctactccgtatttggatgcggcgataaaaactgggctactacgtatcaaaaagtgcctgcttttatcgatgaaacgcttgccgctaaaggggcagaaaacatcgctgaccgcggtgaagcagatgcaagcgacgactttgaaggcacatatgaagaatggcgtgaacatatgtggagtgacgtagcagcctactttaacctcgacattgaaaacagtgaagataataaatctactctttcacttcaatttgtcgacagcgccgcggatatgccgcttgcgaaaatgcacggtgcgttttcaacgaacgtcgtagcaagcaaagaacttcaacagccaggcagtgcacgaagcacgcgacatcttgaaattgaacttccaaaagaagcttcttatcaagaaggagatcatttaggtgttattcctcgcaactatgaaggaatagtaaaccgtgtaacagcaaggttcggcctagatgcatcacagcaaatccgtctggaagcagaagaagaaaaattagctcatttgccactcgctaaaacagtatccgtagaagagcttctgcaatacgtggagcttcaagatcctgttacgcgcacgcagcttcgcgcaatggctgctaaaacggtctgcccgccgcataaagtagagcttgaagccttgcttgaaaagcaagcctacaaagaacaagtgctggcaaaacgtttaacaatgcttgaactgcttgaaaaatacccggcgtgtgaaatgaaattcagcgaatttatcgcccttctgccaagcatacgcccgcgctattactcgatttcttcatcacctcgtgtcgatgaaaaacaagcaagcatcacggtcagcgttgtctcaggagaagcgtggagcggatatggagaatataaaggaattgcgtcgaactatcttgccgagctgcaagaaggagatacgattacgtgctttatttccacaccgcagtcagaatttacgctgccaaaagaccctgaaacgccgcttatcatggtcggaccgggaacaggcgtcgcgccgtttagaggctttgtgcaggcgcgcaaacagctaaaagaacaaggacagtcacttggagaagcacatttatacttcggctgccgttcacctcatgaagactatctgtatcaagaagagcttgaaaacgcccaaagcgaaggcatcattacgcttcataccgctttttctcgcatgccaaatcagccgaaaacatacgttcagcacgtaatggaacaagacggcaagaaattgattgaacttcttgatcaaggagcgcacttctatatttgcggagacggaagccaaatggcacctgccgttgaagcaacgcttatgaaaagctatgctgacgttcaccaagtgagtgaagcagacgctcgcttatggctgcagcagctagaagaaaaaggccgatacgcaaaagacgtgtgggctgggtaa

SEQ ID NO: 92 - DNA, 3228 bp, Artificial Sequence
  BM3 variant (V78F, A82P, F87A, M177Y)
atgaaacatcaccatcaccatcaccccatgagcgattacgacatccccactactgagaatctttattttcagggcgccatggcaattaaagaaatgcctcagccaaaaacgtttggagagcttaaaaatttaccgttattaaacacagataaaccggttcaagctttgatgaaaattgcggatgaattaggagaaatctttaaattcgaggcgcctggtcgtgtaacgcgctacttatcaagtcagcgtctaattaaagaagcatgcgatgaatcacgctttgataaaaacttaagtcaagcgcttaaattttttcgtgattttcctggagacgggttagcaacaagctggacgcatgaaaaaaattggaaaaaagcgcataatatcttacttccaagcttcagtcagcaggcaatgaaaggctatcatgcgatgatggtcgatatcgccgtgcagcttgttcaaaagtgggagcgtctaaatgcagatgagcatattgaagtaccggaagacatgacacgtttaacgcttgatacaattggtctttgcggctttaactatcgctttaacagcttttaccgagatcagcctcatccatttattacaagttatgtccgtgcactggatgaagcaatgaacaagctgcagcgagcaaatccagacgacccagcttatgatgaaaacaagcgccagtttcaagaagatatcaaggtgatgaacgacctagtagataaaattattgcagatcgcaaagcaagcggtgaacaaagcgatgatttattaacgcatatgctaaacggaaaagatccagaaacgggtgagccgcttgatgacgagaacattcgctatcaaattattacattcttaattgcgggacacgaaacaacaagtggtcttttatcatttgcgctgtatttcttagtgaaaaatccacatgtattacaaaaagcagcagaagaagcagcacgagttctagtagatcctgttccaagctacaaacaagtcaaacagcttaaatatgtcggcatggtcttaaacgaagcgctgcgcttatggccaactgctcctgcgttttccctatatgcaaaagaagatacggtgcttggaggagaatatcctttagaaaaaggcgacgaactaatggttctgattcctcagcttcaccgtgataaaacaatttggggagacgatgtggaagagttccgtccagagcgttttgaaaatccaagtgcgattccgcagcatgcgtttaaaccgtttggaaacggtcagcgtgcgtgtatcggtcagcagttcgctcttcatgaagcaacgctggtacttggtatgatgctaaaacactttgactttgaagatcatacaaactacgagctggatattaaagaaactttaacgttaaaacctgaaggctttgtggtaaaagcaaaatcgaaaaaaattccgcttggcggtattccttcacctagcactgaacagtctgctaaaaaagtacgcaaaaaggcagaaaacgctcataatacgccgctgcttgtgctatacggttcaaatatgggaacagctgaaggaacggcgcgtgatttagcagatattgcaatgagcaaaggatttgcaccgcaggtcgcaacgcttgattcacacgccggaaatcttccgcgcgaaggagctgtattaattgtaacggcgtcttataacggtcatccgcctgataacgcaaagcaatttgtcgactggttagaccaagcgtctgctgatgaagtaaaaggcgttcgctactccgtatttggatgcggcgataaaaactgggctactacgtatcaaaaagtgcctgcttttatcgatgaaacgcttgccgctaaaggggcagaaaacatcgctgaccgcggtgaagcagatgcaagcgacgactttgaaggcacatatgaagaatggcgtgaacatatgtggagtgacgtagcagcctactttaacctcgacattgaaaacagtgaagataataaatctactctttcacttcaatttgtcgacagcgccgcggatatgccgcttgcgaaaatgcacggtgcgttttcaacgaacgtcgtagcaagcaaagaacttcaacagccaggcagtgcacgaagcacgcgacatcttgaaattgaacttccaaaagaagcttcttatcaagaaggagatcatttaggtgttattcctcgcaactatgaaggaatagtaaaccgtgtaacagcaaggttcggcctagatgcatcacagcaaatccgtctggaagcagaagaagaaaaattagctcatttgccactcgctaaaacagtatccgtagaagagcttctgcaatacgtggagcttcaagatcctgttacgcgcacgcagcttcgcgcaatggctgctaaaacggtctgcccgccgcataaagtagagcttgaagccttgcttgaaaagcaagcctacaaagaacaagtgctggcaaaacgtttaacaatgcttgaactgcttgaaaaatacccggcgtgtgaaatgaaattcagcgaatttatcgcccttctgccaagcatacgcccgcgctattactcgatttcttcatcacctcgtgtcgatgaaaaacaagcaagcatcacggtcagcgttgtctcaggagaagcgtggagcggatatggagaatataaaggaattgcgtcgaactatcttgccgagctgcaagaaggagatacgattacgtgctttatttccacaccgcagtcagaatttacgctgccaaaagaccctgaaacgccgcttatcatggtcggaccgggaacaggcgtcgcgccgtttagaggctttgtgcaggcgcgcaaacagctaaaagaacaaggacagtcacttggagaagcacatttatacttcggctgccgttcacctcatgaagactatctgtatcaagaagagcttgaaaacgcccaaagcgaaggcatcattacgcttcataccgctttttctcgcatgccaaatcagccgaaaacatacgttcagcacgtaatggaacaagacggcaagaaattgattgaacttcttgatcaaggagcgcacttctatatttgcggagacggaagccaaatggcacctgccgttgaagcaacgcttatgaaaagctatgctgacgttcaccaagtgagtgaagcagacgctcgcttatggctgcagcagctagaagaaaaaggccgatacgcaaaagacgtgtgggctgggtaa

SEQ ID NO: 93 - DNA, 3228 bp, Artificial Sequence
  BM3 variant (V78L, A82P, F87A, M177Y)
atgaaacatcaccatcaccatcaccccatgagcgattacgacatccccactactgagaatctttattttcagggcgccatggcaattaaagaaatgcctcagccaaaaacgtttggagagcttaaaaatttaccgttattaaacacagataaaccggttcaagctttgatgaaaattgcggatgaattaggagaaatctttaaattcgaggcgcctggtcgtgtaacgcgctacttatcaagtcagcgtctaattaaagaagcatgcgatgaatcacgctttgataaaaacttaagtcaagcgcttaaatttctgcgtgattttcctggagacgggttagcaacaagctggacgcatgaaaaaaattggaaaaaagcgcataatatcttacttccaagcttcagtcagcaggcaatgaaaggctatcatgcgatgatggtcgatatcgccgtgcagcttgttcaaaagtgggagcgtctaaatgcagatgagcatattgaagtaccggaagacatgacacgtttaacgcttgatacaattggtctttgcggctttaactatcgctttaacagcttttaccgagatcagcctcatccatttattacaagttatgtccgtgcactggatgaagcaatgaacaagctgcagcgagcaaatccagacgacccagcttatgatgaaaacaagcgccagtttcaagaagatatcaaggtgatgaacgacctagtagataaaattattgcagatcgcaaagcaagcggtgaacaaagcgatgatttattaacgcatatgctaaacggaaaagatccagaaacgggtgagccgcttgatgacgagaacattcgctatcaaattattacattcttaattgcgggacacgaaacaacaagtggtcttttatcatttgcgctgtatttcttagtgaaaaatccacatgtattacaaaaagcagcagaagaagcagcacgagttctagtagatcctgttccaagctacaaacaagtcaaacagcttaaatatgtcggcatggtcttaaacgaagcgctgcgcttatggccaactgctcctgcgttttccctatatgcaaaagaagatacggtgcttggaggagaatatcctttagaaaaaggcgacgaactaatggttctgattcctcagcttcaccgtgataaaacaatttggggagacgatgtggaagagttccgtccagagcgttttgaaaatccaagtgcgattccgcagcatgcgtttaaaccgtttggaaacggtcagcgtgcgtgtatcggtcagcagttcgctcttcatgaagcaacgctggtacttggtatgatgctaaaacactttgactttgaagatcatacaaactacgagctggatattaaagaaactttaacgttaaaacctgaaggctttgtggtaaaagcaaaatcgaaaaaaattccgcttggcggtattccttcacctagcactgaacagtctgctaaaaaagtacgcaaaaaggcagaaaacgctcataatacgccgctgcttgtgctatacggttcaaatatgggaacagctgaaggaacggcgcgtgatttagcagatattgcaatgagcaaaggatttgcaccgcaggtcgcaacgcttgattcacacgccggaaatcttccgcgcgaaggagctgtattaattgtaacggcgtcttataacggtcatccgcctgataacgcaaagcaatttgtcgactggttagaccaagcgtctgctgatgaagtaaaaggcgttcgctactccgtatttggatgcggcgataaaaactgggctactacgtatcaaaaagtgcctgcttttatcgatgaaacgcttgccgctaaaggggcagaaaacatcgctgaccgcggtgaagcagatgcaagcgacgactttgaaggcacatatgaagaatggcgtgaacatatgtggagtgacgtagcagcctactttaacctcgacattgaaaacagtgaagataataaatctactctttcacttcaatttgtcgacagcgccgcggatatgccgcttgcgaaaatgcacggtgcgttttcaacgaacgtcgtagcaagcaaagaacttcaacagccaggcagtgcacgaagcacgcgacatcttgaaattgaacttccaaaagaagcttcttatcaagaaggagatcatttaggtgttattcctcgcaactatgaaggaatagtaaaccgtgtaacagcaaggttcggcctagatgcatcacagcaaatccgtctggaagcagaagaagaaaaattagctcatttgccactcgctaaaacagtatccgtagaagagcttctgcaatacgtggagcttcaagatcctgttacgcgcacgcagcttcgcgcaatggctgctaaaacggtctgcccgccgcataaagtagagcttgaagccttgcttgaaaagcaagcctacaaagaacaagtgctggcaaaacgtttaacaatgcttgaactgcttgaaaaatacccggcgtgtgaaatgaaattcagcgaatttatcgcccttctgccaagcatacgcccgcgctattactcgatttcttcatcacctcgtgtcgatgaaaaacaagcaagcatcacggtcagcgttgtctcaggagaagcgtggagcggatatggagaatataaaggaattgcgtcgaactatcttgccgagctgcaagaaggagatacgattacgtgctttatttccacaccgcagtcagaatttacgctgccaaaagaccctgaaacgccgcttatcatggtcggaccgggaacaggcgtcgcgccgtttagaggctttgtgcaggcgcgcaaacagctaaaagaacaaggacagtcacttggagaagcacatttatacttcggctgccgttcacctcatgaagactatctgtatcaagaagagcttgaaaacgcccaaagcgaaggcatcattacgcttcataccgctttttctcgcatgccaaatcagccgaaaacatacgttcagcacgtaatggaacaagacggcaagaaattgattgaacttcttgatcaaggagcgcacttctatatttgcggagacggaagccaaatggcacctgccgttgaagcaacgcttatgaaaagctatgctgacgttcaccaagtgagtgaagcagacgctcgcttatggctgcagcagctagaagaaaaaggccgatacgcaaaagacgtgtgggctgggtaa

SEQ ID NO: 94 - DNA, 3228 bp, Artificial Sequence
  BM3 variant (V78I, A82P, F87A, M177Y)
atgaaacatcaccatcaccatcaccccatgagcgattacgacatccccactactgagaatctttattttcagggcgccatggcaattaaagaaatgcctcagccaaaaacgtttggagagcttaaaaatttaccgttattaaacacagataaaccggttcaagctttgatgaaaattgcggatgaattaggagaaatctttaaattcgaggcgcctggtcgtgtaacgcgctacttatcaagtcagcgtctaattaaagaagcatgcgatgaatcacgctttgataaaaacttaagtcaagcgcttaaatttattcgtgattttcctggagacgggttagcaacaagctggacgcatgaaaaaaattggaaaaaagcgcataatatcttacttccaagcttcagtcagcaggcaatgaaaggctatcatgcgatgatggtcgatatcgccgtgcagcttgttcaaaagtgggagcgtctaaatgcagatgagcatattgaagtaccggaagacatgacacgtttaacgcttgatacaattggtctttgcggctttaactatcgctttaacagcttttaccgagatcagcctcatccatttattacaagttatgtccgtgcactggatgaagcaatgaacaagctgcagcgagcaaatccagacgacccagcttatgatgaaaacaagcgccagtttcaagaagatatcaaggtgatgaacgacctagtagataaaattattgcagatcgcaaagcaagcggtgaacaaagcgatgatttattaacgcatatgctaaacggaaaagatccagaaacgggtgagccgcttgatgacgagaacattcgctatcaaattattacattcttaattgcgggacacgaaacaacaagtggtcttttatcatttgcgctgtatttcttagtgaaaaatccacatgtattacaaaaagcagcagaagaagcagcacgagttctagtagatcctgttccaagctacaaacaagtcaaacagcttaaatatgtcggcatggtcttaaacgaagcgctgcgcttatggccaactgctcctgcgttttccctatatgcaaaagaagatacggtgcttggaggagaatatcctttagaaaaaggcgacgaactaatggttctgattcctcagcttcaccgtgataaaacaatttggggagacgatgtggaagagttccgtccagagcgttttgaaaatccaagtgcgattccgcagcatgcgtttaaaccgtttggaaacggtcagcgtgcgtgtatcggtcagcagttcgctcttcatgaagcaacgctggtacttggtatgatgctaaaacactttgactttgaagatcatacaaactacgagctggatattaaagaaactttaacgttaaaacctgaaggctttgtggtaaaagcaaaatcgaaaaaaattccgcttggcggtattccttcacctagcactgaacagtctgctaaaaaagtacgcaaaaaggcagaaaacgctcataatacgccgctgcttgtgctatacggttcaaatatgggaacagctgaaggaacggcgcgtgatttagcagatattgcaatgagcaaaggatttgcaccgcaggtcgcaacgcttgattcacacgccggaaatcttccgcgcgaaggagctgtattaattgtaacggcgtcttataacggtcatccgcctgataacgcaaagcaatttgtcgactggttagaccaagcgtctgctgatgaagtaaaaggcgttcgctactccgtatttggatgcggcgataaaaactgggctactacgtatcaaaaagtgcctgcttttatcgatgaaacgcttgccgctaaaggggcagaaaacatcgctgaccgcggtgaagcagatgcaagcgacgactttgaaggcacatatgaagaatggcgtgaacatatgtggagtgacgtagcagcctactttaacctcgacattgaaaacagtgaagataataaatctactctttcacttcaatttgtcgacagcgccgcggatatgccgcttgcgaaaatgcacggtgcgttttcaacgaacgtcgtagcaagcaaagaacttcaacagccaggcagtgcacgaagcacgcgacatcttgaaattgaacttccaaaagaagcttcttatcaagaaggagatcatttaggtgttattcctcgcaactatgaaggaatagtaaaccgtgtaacagcaaggttcggcctagatgcatcacagcaaatccgtctggaagcagaagaagaaaaattagctcatttgccactcgctaaaacagtatccgtagaagagcttctgcaatacgtggagcttcaagatcctgttacgcgcacgcagcttcgcgcaatggctgctaaaacggtctgcccgccgcataaagtagagcttgaagccttgcttgaaaagcaagcctacaaagaacaagtgctggcaaaacgtttaacaatgcttgaactgcttgaaaaatacccggcgtgtgaaatgaaattcagcgaatttatcgcccttctgccaagcatacgcccgcgctattactcgatttcttcatcacctcgtgtcgatgaaaaacaagcaagcatcacggtcagcgttgtctcaggagaagcgtggagcggatatggagaatataaaggaattgcgtcgaactatcttgccgagctgcaagaaggagatacgattacgtgctttatttccacaccgcagtcagaatttacgctgccaaaagaccctgaaacgccgcttatcatggtcggaccgggaacaggcgtcgcgccgtttagaggctttgtgcaggcgcgcaaacagctaaaagaacaaggacagtcacttggagaagcacatttatacttcggctgccgttcacctcatgaagactatctgtatcaagaagagcttgaaaacgcccaaagcgaaggcatcattacgcttcataccgctttttctcgcatgccaaatcagccgaaaacatacgttcagcacgtaatggaacaagacggcaagaaattgattgaacttcttgatcaaggagcgcacttctatatttgcggagacggaagccaaatggcacctgccgttgaagcaacgcttatgaaaagctatgctgacgttcaccaagtgagtgaagcagacgctcgcttatggctgcagcagctagaagaaaaaggccgatacgcaaaagacgtgtgggctgggtaa

SEQ ID NO: 95 - DNA, 3228 bp, Artificial Sequence
  BM3 variant (V78M, A82P, F87A, M177Y)
atgaaacatcaccatcaccatcaccccatgagcgattacgacatccccactactgagaatctttattttcagggcgccatggcaattaaagaaatgcctcagccaaaaacgtttggagagcttaaaaatttaccgttattaaacacagataaaccggttcaagctttgatgaaaattgcggatgaattaggagaaatctttaaattcgaggcgcctggtcgtgtaacgcgctacttatcaagtcagcgtctaattaaagaagcatgcgatgaatcacgctttgataaaaacttaagtcaagcgcttaaatttatgcgtgattttcctggagacgggttagcaacaagctggacgcatgaaaaaaattggaaaaaagcgcataatatcttacttccaagcttcagtcagcaggcaatgaaaggctatcatgcgatgatggtcgatatcgccgtgcagcttgttcaaaagtgggagcgtctaaatgcagatgagcatattgaagtaccggaagacatgacacgtttaacgcttgatacaattggtctttgcggctttaactatcgctttaacagcttttaccgagatcagcctcatccatttattacaagttatgtccgtgcactggatgaagcaatgaacaagctgcagcgagcaaatccagacgacccagcttatgatgaaaacaagcgccagtttcaagaagatatcaaggtgatgaacgacctagtagataaaattattgcagatcgcaaagcaagcggtgaacaaagcgatgatttattaacgcatatgctaaacggaaaagatccagaaacgggtgagccgcttgatgacgagaacattcgctatcaaattattacattcttaattgcgggacacgaaacaacaagtggtcttttatcatttgcgctgtatttcttagtgaaaaatccacatgtattacaaaaagcagcagaagaagcagcacgagttctagtagatcctgttccaagctacaaacaagtcaaacagcttaaatatgtcggcatggtcttaaacgaagcgctgcgcttatggccaactgctcctgcgttttccctatatgcaaaagaagatacggtgcttggaggagaatatcctttagaaaaaggcgacgaactaatggttctgattcctcagcttcaccgtgataaaacaatttggggagacgatgtggaagagttccgtccagagcgttttgaaaatccaagtgcgattccgcagcatgcgtttaaaccgtttggaaacggtcagcgtgcgtgtatcggtcagcagttcgctcttcatgaagcaacgctggtacttggtatgatgctaaaacactttgactttgaagatcatacaaactacgagctggatattaaagaaactttaacgttaaaacctgaaggctttgtggtaaaagcaaaatcgaaaaaaattccgcttggcggtattccttcacctagcactgaacagtctgctaaaaaagtacgcaaaaaggcagaaaacgctcataatacgccgctgcttgtgctatacggttcaaatatgggaacagctgaaggaacggcgcgtgatttagcagatattgcaatgagcaaaggatttgcaccgcaggtcgcaacgcttgattcacacgccggaaatcttccgcgcgaaggagctgtattaattgtaacggcgtcttataacggtcatccgcctgataacgcaaagcaatttgtcgactggttagaccaagcgtctgctgatgaagtaaaaggcgttcgctactccgtatttggatgcggcgataaaaactgggctactacgtatcaaaaagtgcctgcttttatcgatgaaacgcttgccgctaaaggggcagaaaacatcgctgaccgcggtgaagcagatgcaagcgacgactttgaaggcacatatgaagaatggcgtgaacatatgtggagtgacgtagcagcctactttaacctcgacattgaaaacagtgaagataataaatctactctttcacttcaatttgtcgacagcgccgcggatatgccgcttgcgaaaatgcacggtgcgttttcaacgaacgtcgtagcaagcaaagaacttcaacagccaggcagtgcacgaagcacgcgacatcttgaaattgaacttccaaaagaagcttcttatcaagaaggagatcatttaggtgttattcctcgcaactatgaaggaatagtaaaccgtgtaacagcaaggttcggcctagatgcatcacagcaaatccgtctggaagcagaagaagaaaaattagctcatttgccactcgctaaaacagtatccgtagaagagcttctgcaatacgtggagcttcaagatcctgttacgcgcacgcagcttcgcgcaatggctgctaaaacggtctgcccgccgcataaagtagagcttgaagccttgcttgaaaagcaagcctacaaagaacaagtgctggcaaaacgtttaacaatgcttgaactgcttgaaaaatacccggcgtgtgaaatgaaattcagcgaatttatcgcccttctgccaagcatacgcccgcgctattactcgatttcttcatcacctcgtgtcgatgaaaaacaagcaagcatcacggtcagcgttgtctcaggagaagcgtggagcggatatggagaatataaaggaattgcgtcgaactatcttgccgagctgcaagaaggagatacgattacgtgctttatttccacaccgcagtcagaatttacgctgccaaaagaccctgaaacgccgcttatcatggtcggaccgggaacaggcgtcgcgccgtttagaggctttgtgcaggcgcgcaaacagctaaaagaacaaggacagtcacttggagaagcacatttatacttcggctgccgttcacctcatgaagactatctgtatcaagaagagcttgaaaacgcccaaagcgaaggcatcattacgcttcataccgctttttctcgcatgccaaatcagccgaaaacatacgttcagcacgtaatggaacaagacggcaagaaattgattgaacttcttgatcaaggagcgcacttctatatttgcggagacggaagccaaatggcacctgccgttgaagcaacgcttatgaaaagctatgctgacgttcaccaagtgagtgaagcagacgctcgcttatggctgcagcagctagaagaaaaaggccgatacgcaaaagacgtgtgggctgggtaa

SEQ ID NO: 96 - DNA, 3228 bp, Artificial Sequence
  BM3 variant (V78Y, A82P, F87A, M177Y)
atgaaacatcaccatcaccatcaccccatgagcgattacgacatccccactactgagaatctttattttcagggcgccatggcaattaaagaaatgcctcagccaaaaacgtttggagagcttaaaaatttaccgttattaaacacagataaaccggttcaagctttgatgaaaattgcggatgaattaggagaaatctttaaattcgaggcgcctggtcgtgtaacgcgctacttatcaagtcagcgtctaattaaagaagcatgcgatgaatcacgctttgataaaaacttaagtcaagcgcttaaattttatcgtgattttcctggagacgggttagcaacaagctggacgcatgaaaaaaattggaaaaaagcgcataatatcttacttccaagcttcagtcagcaggcaatgaaaggctatcatgcgatgatggtcgatatcgccgtgcagcttgttcaaaagtgggagcgtctaaatgcagatgagcatattgaagtaccggaagacatgacacgtttaacgcttgatacaattggtctttgcggctttaactatcgctttaacagcttttaccgagatcagcctcatccatttattacaagttatgtccgtgcactggatgaagcaatgaacaagctgcagcgagcaaatccagacgacccagcttatgatgaaaacaagcgccagtttcaagaagatatcaaggtgatgaacgacctagtagataaaattattgcagatcgcaaagcaagcggtgaacaaagcgatgatttattaacgcatatgctaaacggaaaagatccagaaacgggtgagccgcttgatgacgagaacattcgctatcaaattattacattcttaattgcgggacacgaaacaacaagtggtcttttatcatttgcgctgtatttcttagtgaaaaatccacatgtattacaaaaagcagcagaagaagcagcacgagttctagtagatcctgttccaagctacaaacaagtcaaacagcttaaatatgtcggcatggtcttaaacgaagcgctgcgcttatggccaactgctcctgcgttttccctatatgcaaaagaagatacggtgcttggaggagaatatcctttagaaaaaggcgacgaactaatggttctgattcctcagcttcaccgtgataaaacaatttggggagacgatgtggaagagttccgtccagagcgttttgaaaatccaagtgcgattccgcagcatgcgtttaaaccgtttggaaacggtcagcgtgcgtgtatcggtcagcagttcgctcttcatgaagcaacgctggtacttggtatgatgctaaaacactttgactttgaagatcatacaaactacgagctggatattaaagaaactttaacgttaaaacctgaaggctttgtggtaaaagcaaaatcgaaaaaaattccgcttggcggtattccttcacctagcactgaacagtctgctaaaaaagtacgcaaaaaggcagaaaacgctcataatacgccgctgcttgtgctatacggttcaaatatgggaacagctgaaggaacggcgcgtgatttagcagatattgcaatgagcaaaggatttgcaccgcaggtcgcaacgcttgattcacacgccggaaatcttccgcgcgaaggagctgtattaattgtaacggcgtcttataacggtcatccgcctgataacgcaaagcaatttgtcgactggttagaccaagcgtctgctgatgaagtaaaaggcgttcgctactccgtatttggatgcggcgataaaaactgggctactacgtatcaaaaagtgcctgcttttatcgatgaaacgcttgccgctaaaggggcagaaaacatcgctgaccgcggtgaagcagatgcaagcgacgactttgaaggcacatatgaagaatggcgtgaacatatgtggagtgacgtagcagcctactttaacctcgacattgaaaacagtgaagataataaatctactctttcacttcaatttgtcgacagcgccgcggatatgccgcttgcgaaaatgcacggtgcgttttcaacgaacgtcgtagcaagcaaagaacttcaacagccaggcagtgcacgaagcacgcgacatcttgaaattgaacttccaaaagaagcttcttatcaagaaggagatcatttaggtgttattcctcgcaactatgaaggaatagtaaaccgtgtaacagcaaggttcggcctagatgcatcacagcaaatccgtctggaagcagaagaagaaaaattagctcatttgccactcgctaaaacagtatccgtagaagagcttctgcaatacgtggagcttcaagatcctgttacgcgcacgcagcttcgcgcaatggctgctaaaacggtctgcccgccgcataaagtagagcttgaagccttgcttgaaaagcaagcctacaaagaacaagtgctggcaaaacgtttaacaatgcttgaactgcttgaaaaatacccggcgtgtgaaatgaaattcagcgaatttatcgcccttctgccaagcatacgcccgcgctattactcgatttcttcatcacctcgtgtcgatgaaaaacaagcaagcatcacggtcagcgttgtctcaggagaagcgtggagcggatatggagaatataaaggaattgcgtcgaactatcttgccgagctgcaagaaggagatacgattacgtgctttatttccacaccgcagtcagaatttacgctgccaaaagaccctgaaacgccgcttatcatggtcggaccgggaacaggcgtcgcgccgtttagaggctttgtgcaggcgcgcaaacagctaaaagaacaaggacagtcacttggagaagcacatttatacttcggctgccgttcacctcatgaagactatctgtatcaagaagagcttgaaaacgcccaaagcgaaggcatcattacgcttcataccgctttttctcgcatgccaaatcagccgaaaacatacgttcagcacgtaatggaacaagacggcaagaaattgattgaacttcttgatcaaggagcgcacttctatatttgcggagacggaagccaaatggcacctgccgttgaagcaacgcttatgaaaagctatgctgacgttcaccaagtgagtgaagcagacgctcgcttatggctgcagcagctagaagaaaaaggccgatacgcaaaagacgtgtgggctgggtaa

SEQ ID NO: 97 - DNA, 3228 bp, Artificial Sequence
  BM3 variant (V78F, A82Q, F87A, M177Y)
atgaaacatcaccatcaccatcaccccatgagcgattacgacatccccactactgagaatctttattttcagggcgccatggcaattaaagaaatgcctcagccaaaaacgtttggagagcttaaaaatttaccgttattaaacacagataaaccggttcaagctttgatgaaaattgcggatgaattaggagaaatctttaaattcgaggcgcctggtcgtgtaacgcgctacttatcaagtcagcgtctaattaaagaagcatgcgatgaatcacgctttgataaaaacttaagtcaagcgcttaaattttttcgtgattttcagggagacgggttagcaacaagctggacgcatgaaaaaaattggaaaaaagcgcataatatcttacttccaagcttcagtcagcaggcaatgaaaggctatcatgcgatgatggtcgatatcgccgtgcagcttgttcaaaagtgggagcgtctaaatgcagatgagcatattgaagtaccggaagacatgacacgtttaacgcttgatacaattggtctttgcggctttaactatcgctttaacagcttttaccgagatcagcctcatccatttattacaagttatgtccgtgcactggatgaagcaatgaacaagctgcagcgagcaaatccagacgacccagcttatgatgaaaacaagcgccagtttcaagaagatatcaaggtgatgaacgacctagtagataaaattattgcagatcgcaaagcaagcggtgaacaaagcgatgatttattaacgcatatgctaaacggaaaagatccagaaacgggtgagccgcttgatgacgagaacattcgctatcaaattattacattcttaattgcgggacacgaaacaacaagtggtcttttatcatttgcgctgtatttcttagtgaaaaatccacatgtattacaaaaagcagcagaagaagcagcacgagttctagtagatcctgttccaagctacaaacaagtcaaacagcttaaatatgtcggcatggtcttaaacgaagcgctgcgcttatggccaactgctcctgcgttttccctatatgcaaaagaagatacggtgcttggaggagaatatcctttagaaaaaggcgacgaactaatggttctgattcctcagcttcaccgtgataaaacaatttggggagacgatgtggaagagttccgtccagagcgttttgaaaatccaagtgcgattccgcagcatgcgtttaaaccgtttggaaacggtcagcgtgcgtgtatcggtcagcagttcgctcttcatgaagcaacgctggtacttggtatgatgctaaaacactttgactttgaagatcatacaaactacgagctggatattaaagaaactttaacgttaaaacctgaaggctttgtggtaaaagcaaaatcgaaaaaaattccgcttggcggtattccttcacctagcactgaacagtctgctaaaaaagtacgcaaaaaggcagaaaacgctcataatacgccgctgcttgtgctatacggttcaaatatgggaacagctgaaggaacggcgcgtgatttagcagatattgcaatgagcaaaggatttgcaccgcaggtcgcaacgcttgattcacacgccggaaatcttccgcgcgaaggagctgtattaattgtaacggcgtcttataacggtcatccgcctgataacgcaaagcaatttgtcgactggttagaccaagcgtctgctgatgaagtaaaaggcgttcgctactccgtatttggatgcggcgataaaaactgggctactacgtatcaaaaagtgcctgcttttatcgatgaaacgcttgccgctaaaggggcagaaaacatcgctgaccgcggtgaagcagatgcaagcgacgactttgaaggcacatatgaagaatggcgtgaacatatgtggagtgacgtagcagcctactttaacctcgacattgaaaacagtgaagataataaatctactctttcacttcaatttgtcgacagcgccgcggatatgccgcttgcgaaaatgcacggtgcgttttcaacgaacgtcgtagcaagcaaagaacttcaacagccaggcagtgcacgaagcacgcgacatcttgaaattgaacttccaaaagaagcttcttatcaagaaggagatcatttaggtgttattcctcgcaactatgaaggaatagtaaaccgtgtaacagcaaggttcggcctagatgcatcacagcaaatccgtctggaagcagaagaagaaaaattagctcatttgccactcgctaaaacagtatccgtagaagagcttctgcaatacgtggagcttcaagatcctgttacgcgcacgcagcttcgcgcaatggctgctaaaacggtctgcccgccgcataaagtagagcttgaagccttgcttgaaaagcaagcctacaaagaacaagtgctggcaaaacgtttaacaatgcttgaactgcttgaaaaatacccggcgtgtgaaatgaaattcagcgaatttatcgcccttctgccaagcatacgcccgcgctattactcgatttcttcatcacctcgtgtcgatgaaaaacaagcaagcatcacggtcagcgttgtctcaggagaagcgtggagcggatatggagaatataaaggaattgcgtcgaactatcttgccgagctgcaagaaggagatacgattacgtgctttatttccacaccgcagtcagaatttacgctgccaaaagaccctgaaacgccgcttatcatggtcggaccgggaacaggcgtcgcgccgtttagaggctttgtgcaggcgcgcaaacagctaaaagaacaaggacagtcacttggagaagcacatttatacttcggctgccgttcacctcatgaagactatctgtatcaagaagagcttgaaaacgcccaaagcgaaggcatcattacgcttcataccgctttttctcgcatgccaaatcagccgaaaacatacgttcagcacgtaatggaacaagacggcaagaaattgattgaacttcttgatcaaggagcgcacttctatatttgcggagacggaagccaaatggcacctgccgttgaagcaacgcttatgaaaagctatgctgacgttcaccaagtgagtgaagcagacgctcgcttatggctgcagcagctagaagaaaaaggccgatacgcaaaagacgtgtgggctgggtaa

SEQ ID NO: 98 - DNA, 3228 bp, Artificial Sequence
  BM3 variant (V78L, A82Q, F87A, M177Y)
atgaaacatcaccatcaccatcaccccatgagcgattacgacatccccactactgagaatctttattttcagggcgccatggcaattaaagaaatgcctcagccaaaaacgtttggagagcttaaaaatttaccgttattaaacacagataaaccggttcaagctttgatgaaaattgcggatgaattaggagaaatctttaaattcgaggcgcctggtcgtgtaacgcgctacttatcaagtcagcgtctaattaaagaagcatgcgatgaatcacgctttgataaaaacttaagtcaagcgcttaaatttctgcgtgattttcagggagacgggttagcaacaagctggacgcatgaaaaaaattggaaaaaagcgcataatatcttacttccaagcttcagtcagcaggcaatgaaaggctatcatgcgatgatggtcgatatcgccgtgcagcttgttcaaaagtgggagcgtctaaatgcagatgagcatattgaagtaccggaagacatgacacgtttaacgcttgatacaattggtctttgcggctttaactatcgctttaacagcttttaccgagatcagcctcatccatttattacaagttatgtccgtgcactggatgaagcaatgaacaagctgcagcgagcaaatccagacgacccagcttatgatgaaaacaagcgccagtttcaagaagatatcaaggtgatgaacgacctagtagataaaattattgcagatcgcaaagcaagcggtgaacaaagcgatgatttattaacgcatatgctaaacggaaaagatccagaaacgggtgagccgcttgatgacgagaacattcgctatcaaattattacattcttaattgcgggacacgaaacaacaagtggtcttttatcatttgcgctgtatttcttagtgaaaaatccacatgtattacaaaaagcagcagaagaagcagcacgagttctagtagatcctgttccaagctacaaacaagtcaaacagcttaaatatgtcggcatggtcttaaacgaagcgctgcgcttatggccaactgctcctgcgttttccctatatgcaaaagaagatacggtgcttggaggagaatatcctttagaaaaaggcgacgaactaatggttctgattcctcagcttcaccgtgataaaacaatttggggagacgatgtggaagagttccgtccagagcgttttgaaaatccaagtgcgattccgcagcatgcgtttaaaccgtttggaaacggtcagcgtgcgtgtatcggtcagcagttcgctcttcatgaagcaacgctggtacttggtatgatgctaaaacactttgactttgaagatcatacaaactacgagctggatattaaagaaactttaacgttaaaacctgaaggctttgtggtaaaagcaaaatcgaaaaaaattccgcttggcggtattccttcacctagcactgaacagtctgctaaaaaagtacgcaaaaaggcagaaaacgctcataatacgccgctgcttgtgctatacggttcaaatatgggaacagctgaaggaacggcgcgtgatttagcagatattgcaatgagcaaaggatttgcaccgcaggtcgcaacgcttgattcacacgccggaaatcttccgcgcgaaggagctgtattaattgtaacggcgtcttataacggtcatccgcctgataacgcaaagcaatttgtcgactggttagaccaagcgtctgctgatgaagtaaaaggcgttcgctactccgtatttggatgcggcgataaaaactgggctactacgtatcaaaaagtgcctgcttttatcgatgaaacgcttgccgctaaaggggcagaaaacatcgctgaccgcggtgaagcagatgcaagcgacgactttgaaggcacatatgaagaatggcgtgaacatatgtggagtgacgtagcagcctactttaacctcgacattgaaaacagtgaagataataaatctactctttcacttcaatttgtcgacagcgccgcggatatgccgcttgcgaaaatgcacggtgcgttttcaacgaacgtcgtagcaagcaaagaacttcaacagccaggcagtgcacgaagcacgcgacatcttgaaattgaacttccaaaagaagcttcttatcaagaaggagatcatttaggtgttattcctcgcaactatgaaggaatagtaaaccgtgtaacagcaaggttcggcctagatgcatcacagcaaatccgtctggaagcagaagaagaaaaattagctcatttgccactcgctaaaacagtatccgtagaagagcttctgcaatacgtggagcttcaagatcctgttacgcgcacgcagcttcgcgcaatggctgctaaaacggtctgcccgccgcataaagtagagcttgaagccttgcttgaaaagcaagcctacaaagaacaagtgctggcaaaacgtttaacaatgcttgaactgcttgaaaaatacccggcgtgtgaaatgaaattcagcgaatttatcgcccttctgccaagcatacgcccgcgctattactcgatttcttcatcacctcgtgtcgatgaaaaacaagcaagcatcacggtcagcgttgtctcaggagaagcgtggagcggatatggagaatataaaggaattgcgtcgaactatcttgccgagctgcaagaaggagatacgattacgtgctttatttccacaccgcagtcagaatttacgctgccaaaagaccctgaaacgccgcttatcatggtcggaccgggaacaggcgtcgcgccgtttagaggctttgtgcaggcgcgcaaacagctaaaagaacaaggacagtcacttggagaagcacatttatacttcggctgccgttcacctcatgaagactatctgtatcaagaagagcttgaaaacgcccaaagcgaaggcatcattacgcttcataccgctttttctcgcatgccaaatcagccgaaaacatacgttcagcacgtaatggaacaagacggcaagaaattgattgaacttcttgatcaaggagcgcacttctatatttgcggagacggaagccaaatggcacctgccgttgaagcaacgcttatgaaaagctatgctgacgttcaccaagtgagtgaagcagacgctcgcttatggctgcagcagctagaagaaaaaggccgatacgcaaaagacgtgtgggctgggtaa

SEQ ID NO: 99 - DNA, 3228 bp, Artificial Sequence
  BM3 variant (V78I, A82Q, F87A, M177Y)
atgaaacatcaccatcaccatcaccccatgagcgattacgacatccccactactgagaatctttattttcagggcgccatggcaattaaagaaatgcctcagccaaaaacgtttggagagcttaaaaatttaccgttattaaacacagataaaccggttcaagctttgatgaaaattgcggatgaattaggagaaatctttaaattcgaggcgcctggtcgtgtaacgcgctacttatcaagtcagcgtctaattaaagaagcatgcgatgaatcacgctttgataaaaacttaagtcaagcgcttaaatttattcgtgattttcagggagacgggttagcaacaagctggacgcatgaaaaaaattggaaaaaagcgcataatatcttacttccaagcttcagtcagcaggcaatgaaaggctatcatgcgatgatggtcgatatcgccgtgcagcttgttcaaaagtgggagcgtctaaatgcagatgagcatattgaagtaccggaagacatgacacgtttaacgcttgatacaattggtctttgcggctttaactatcgctttaacagcttttaccgagatcagcctcatccatttattacaagttatgtccgtgcactggatgaagcaatgaacaagctgcagcgagcaaatccagacgacccagcttatgatgaaaacaagcgccagtttcaagaagatatcaaggtgatgaacgacctagtagataaaattattgcagatcgcaaagcaagcggtgaacaaagcgatgatttattaacgcatatgctaaacggaaaagatccagaaacgggtgagccgcttgatgacgagaacattcgctatcaaattattacattcttaattgcgggacacgaaacaacaagtggtcttttatcatttgcgctgtatttcttagtgaaaaatccacatgtattacaaaaagcagcagaagaagcagcacgagttctagtagatcctgttccaagctacaaacaagtcaaacagcttaaatatgtcggcatggtcttaaacgaagcgctgcgcttatggccaactgctcctgcgttttccctatatgcaaaagaagatacggtgcttggaggagaatatcctttagaaaaaggcgacgaactaatggttctgattcctcagcttcaccgtgataaaacaatttggggagacgatgtggaagagttccgtccagagcgttttgaaaatccaagtgcgattccgcagcatgcgtttaaaccgtttggaaacggtcagcgtgcgtgtatcggtcagcagttcgctcttcatgaagcaacgctggtacttggtatgatgctaaaacactttgactttgaagatcatacaaactacgagctggatattaaagaaactttaacgttaaaacctgaaggctttgtggtaaaagcaaaatcgaaaaaaattccgcttggcggtattccttcacctagcactgaacagtctgctaaaaaagtacgcaaaaaggcagaaaacgctcataatacgccgctgcttgtgctatacggttcaaatatgggaacagctgaaggaacggcgcgtgatttagcagatattgcaatgagcaaaggatttgcaccgcaggtcgcaacgcttgattcacacgccggaaatcttccgcgcgaaggagctgtattaattgtaacggcgtcttataacggtcatccgcctgataacgcaaagcaatttgtcgactggttagaccaagcgtctgctgatgaagtaaaaggcgttcgctactccgtatttggatgcggcgataaaaactgggctactacgtatcaaaaagtgcctgcttttatcgatgaaacgcttgccgctaaaggggcagaaaacatcgctgaccgcggtgaagcagatgcaagcgacgactttgaaggcacatatgaagaatggcgtgaacatatgtggagtgacgtagcagcctactttaacctcgacattgaaaacagtgaagataataaatctactctttcacttcaatttgtcgacagcgccgcggatatgccgcttgcgaaaatgcacggtgcgttttcaacgaacgtcgtagcaagcaaagaacttcaacagccaggcagtgcacgaagcacgcgacatcttgaaattgaacttccaaaagaagcttcttatcaagaaggagatcatttaggtgttattcctcgcaactatgaaggaatagtaaaccgtgtaacagcaaggttcggcctagatgcatcacagcaaatccgtctggaagcagaagaagaaaaattagctcatttgccactcgctaaaacagtatccgtagaagagcttctgcaatacgtggagcttcaagatcctgttacgcgcacgcagcttcgcgcaatggctgctaaaacggtctgcccgccgcataaagtagagcttgaagccttgcttgaaaagcaagcctacaaagaacaagtgctggcaaaacgtttaacaatgcttgaactgcttgaaaaatacccggcgtgtgaaatgaaattcagcgaatttatcgcccttctgccaagcatacgcccgcgctattactcgatttcttcatcacctcgtgtcgatgaaaaacaagcaagcatcacggtcagcgttgtctcaggagaagcgtggagcggatatggagaatataaaggaattgcgtcgaactatcttgccgagctgcaagaaggagatacgattacgtgctttatttccacaccgcagtcagaatttacgctgccaaaagaccctgaaacgccgcttatcatggtcggaccgggaacaggcgtcgcgccgtttagaggctttgtgcaggcgcgcaaacagctaaaagaacaaggacagtcacttggagaagcacatttatacttcggctgccgttcacctcatgaagactatctgtatcaagaagagcttgaaaacgcccaaagcgaaggcatcattacgcttcataccgctttttctcgcatgccaaatcagccgaaaacatacgttcagcacgtaatggaacaagacggcaagaaattgattgaacttcttgatcaaggagcgcacttctatatttgcggagacggaagccaaatggcacctgccgttgaagcaacgcttatgaaaagctatgctgacgttcaccaagtgagtgaagcagacgctcgcttatggctgcagcagctagaagaaaaaggccgatacgcaaaagacgtgtgggctgggtaa

SEQ ID NO: 100 - DNA, 3228 bp, Artificial Sequence
  BM3 variant (V78M, A82Q, F87A, M177Y)
atgaaacatcaccatcaccatcaccccatgagcgattacgacatccccactactgagaatctttattttcagggcgccatggcaattaaagaaatgcctcagccaaaaacgtttggagagcttaaaaatttaccgttattaaacacagataaaccggttcaagctttgatgaaaattgcggatgaattaggagaaatctttaaattcgaggcgcctggtcgtgtaacgcgctacttatcaagtcagcgtctaattaaagaagcatgcgatgaatcacgctttgataaaaacttaagtcaagcgcttaaatttatgcgtgattttcagggagacgggttagcaacaagctggacgcatgaaaaaaattggaaaaaagcgcataatatcttacttccaagcttcagtcagcaggcaatgaaaggctatcatgcgatgatggtcgatatcgccgtgcagcttgttcaaaagtgggagcgtctaaatgcagatgagcatattgaagtaccggaagacatgacacgtttaacgcttgatacaattggtctttgcggctttaactatcgctttaacagcttttaccgagatcagcctcatccatttattacaagttatgtccgtgcactggatgaagcaatgaacaagctgcagcgagcaaatccagacgacccagcttatgatgaaaacaagcgccagtttcaagaagatatcaaggtgatgaacgacctagtagataaaattattgcagatcgcaaagcaagcggtgaacaaagcgatgatttattaacgcatatgctaaacggaaaagatccagaaacgggtgagccgcttgatgacgagaacattcgctatcaaattattacattcttaattgcgggacacgaaacaacaagtggtcttttatcatttgcgctgtatttcttagtgaaaaatccacatgtattacaaaaagcagcagaagaagcagcacgagttctagtagatcctgttccaagctacaaacaagtcaaacagcttaaatatgtcggcatggtcttaaacgaagcgctgcgcttatggccaactgctcctgcgttttccctatatgcaaaagaagatacggtgcttggaggagaatatcctttagaaaaaggcgacgaactaatggttctgattcctcagcttcaccgtgataaaacaatttggggagacgatgtggaagagttccgtccagagcgttttgaaaatccaagtgcgattccgcagcatgcgtttaaaccgtttggaaacggtcagcgtgcgtgtatcggtcagcagttcgctcttcatgaagcaacgctggtacttggtatgatgctaaaacactttgactttgaagatcatacaaactacgagctggatattaaagaaactttaacgttaaaacctgaaggctttgtggtaaaagcaaaatcgaaaaaaattccgcttggcggtattccttcacctagcactgaacagtctgctaaaaaagtacgcaaaaaggcagaaaacgctcataatacgccgctgcttgtgctatacggttcaaatatgggaacagctgaaggaacggcgcgtgatttagcagatattgcaatgagcaaaggatttgcaccgcaggtcgcaacgcttgattcacacgccggaaatcttccgcgcgaaggagctgtattaattgtaacggcgtcttataacggtcatccgcctgataacgcaaagcaatttgtcgactggttagaccaagcgtctgctgatgaagtaaaaggcgttcgctactccgtatttggatgcggcgataaaaactgggctactacgtatcaaaaagtgcctgcttttatcgatgaaacgcttgccgctaaaggggcagaaaacatcgctgaccgcggtgaagcagatgcaagcgacgactttgaaggcacatatgaagaatggcgtgaacatatgtggagtgacgtagcagcctactttaacctcgacattgaaaacagtgaagataataaatctactctttcacttcaatttgtcgacagcgccgcggatatgccgcttgcgaaaatgcacggtgcgttttcaacgaacgtcgtagcaagcaaagaacttcaacagccaggcagtgcacgaagcacgcgacatcttgaaattgaacttccaaaagaagcttcttatcaagaaggagatcatttaggtgttattcctcgcaactatgaaggaatagtaaaccgtgtaacagcaaggttcggcctagatgcatcacagcaaatccgtctggaagcagaagaagaaaaattagctcatttgccactcgctaaaacagtatccgtagaagagcttctgcaatacgtggagcttcaagatcctgttacgcgcacgcagcttcgcgcaatggctgctaaaacggtctgcccgccgcataaagtagagcttgaagccttgcttgaaaagcaagcctacaaagaacaagtgctggcaaaacgtttaacaatgcttgaactgcttgaaaaatacccggcgtgtgaaatgaaattcagcgaatttatcgcccttctgccaagcatacgcccgcgctattactcgatttcttcatcacctcgtgtcgatgaaaaacaagcaagcatcacggtcagcgttgtctcaggagaagcgtggagcggatatggagaatataaaggaattgcgtcgaactatcttgccgagctgcaagaaggagatacgattacgtgctttatttccacaccgcagtcagaatttacgctgccaaaagaccctgaaacgccgcttatcatggtcggaccgggaacaggcgtcgcgccgtttagaggctttgtgcaggcgcgcaaacagctaaaagaacaaggacagtcacttggagaagcacatttatacttcggctgccgttcacctcatgaagactatctgtatcaagaagagcttgaaaacgcccaaagcgaaggcatcattacgcttcataccgctttttctcgcatgccaaatcagccgaaaacatacgttcagcacgtaatggaacaagacggcaagaaattgattgaacttcttgatcaaggagcgcacttctatatttgcggagacggaagccaaatggcacctgccgttgaagcaacgcttatgaaaagctatgctgacgttcaccaagtgagtgaagcagacgctcgcttatggctgcagcagctagaagaaaaaggccgatacgcaaaagacgtgtgggctgggtaa

SEQ ID NO: 101 - DNA, 3228 bp, Artificial Sequence
  BM3 variant (V78Y, A82Q, F87A, M177Y)
atgaaacatcaccatcaccatcaccccatgagcgattacgacatccccactactgagaatctttattttcagggcgccatggcaattaaagaaatgcctcagccaaaaacgtttggagagcttaaaaatttaccgttattaaacacagataaaccggttcaagctttgatgaaaattgcggatgaattaggagaaatctttaaattcgaggcgcctggtcgtgtaacgcgctacttatcaagtcagcgtctaattaaagaagcatgcgatgaatcacgctttgataaaaacttaagtcaagcgcttaaattttatcgtgattttcagggagacgggttagcaacaagctggacgcatgaaaaaaattggaaaaaagcgcataatatcttacttccaagcttcagtcagcaggcaatgaaaggctatcatgcgatgatggtcgatatcgccgtgcagcttgttcaaaagtgggagcgtctaaatgcagatgagcatattgaagtaccggaagacatgacacgtttaacgcttgatacaattggtctttgcggctttaactatcgctttaacagcttttaccgagatcagcctcatccatttattacaagttatgtccgtgcactggatgaagcaatgaacaagctgcagcgagcaaatccagacgacccagcttatgatgaaaacaagcgccagtttcaagaagatatcaaggtgatgaacgacctagtagataaaattattgcagatcgcaaagcaagcggtgaacaaagcgatgatttattaacgcatatgctaaacggaaaagatccagaaacgggtgagccgcttgatgacgagaacattcgctatcaaattattacattcttaattgcgggacacgaaacaacaagtggtcttttatcatttgcgctgtatttcttagtgaaaaatccacatgtattacaaaaagcagcagaagaagcagcacgagttctagtagatcctgttccaagctacaaacaagtcaaacagcttaaatatgtcggcatggtcttaaacgaagcgctgcgcttatggccaactgctcctgcgttttccctatatgcaaaagaagatacggtgcttggaggagaatatcctttagaaaaaggcgacgaactaatggttctgattcctcagcttcaccgtgataaaacaatttggggagacgatgtggaagagttccgtccagagcgttttgaaaatccaagtgcgattccgcagcatgcgtttaaaccgtttggaaacggtcagcgtgcgtgtatcggtcagcagttcgctcttcatgaagcaacgctggtacttggtatgatgctaaaacactttgactttgaagatcatacaaactacgagctggatattaaagaaactttaacgttaaaacctgaaggctttgtggtaaaagcaaaatcgaaaaaaattccgcttggcggtattccttcacctagcactgaacagtctgctaaaaaagtacgcaaaaaggcagaaaacgctcataatacgccgctgcttgtgctatacggttcaaatatgggaacagctgaaggaacggcgcgtgatttagcagatattgcaatgagcaaaggatttgcaccgcaggtcgcaacgcttgattcacacgccggaaatcttccgcgcgaaggagctgtattaattgtaacggcgtcttataacggtcatccgcctgataacgcaaagcaatttgtcgactggttagaccaagcgtctgctgatgaagtaaaaggcgttcgctactccgtatttggatgcggcgataaaaactgggctactacgtatcaaaaagtgcctgcttttatcgatgaaacgcttgccgctaaaggggcagaaaacatcgctgaccgcggtgaagcagatgcaagcgacgactttgaaggcacatatgaagaatggcgtgaacatatgtggagtgacgtagcagcctactttaacctcgacattgaaaacagtgaagataataaatctactctttcacttcaatttgtcgacagcgccgcggatatgccgcttgcgaaaatgcacggtgcgttttcaacgaacgtcgtagcaagcaaagaacttcaacagccaggcagtgcacgaagcacgcgacatcttgaaattgaacttccaaaagaagcttcttatcaagaaggagatcatttaggtgttattcctcgcaactatgaaggaatagtaaaccgtgtaacagcaaggttcggcctagatgcatcacagcaaatccgtctggaagcagaagaagaaaaattagctcatttgccactcgctaaaacagtatccgtagaagagcttctgcaatacgtggagcttcaagatcctgttacgcgcacgcagcttcgcgcaatggctgctaaaacggtctgcccgccgcataaagtagagcttgaagccttgcttgaaaagcaagcctacaaagaacaagtgctggcaaaacgtttaacaatgcttgaactgcttgaaaaatacccggcgtgtgaaatgaaattcagcgaatttatcgcccttctgccaagcatacgcccgcgctattactcgatttcttcatcacctcgtgtcgatgaaaaacaagcaagcatcacggtcagcgttgtctcaggagaagcgtggagcggatatggagaatataaaggaattgcgtcgaactatcttgccgagctgcaagaaggagatacgattacgtgctttatttccacaccgcagtcagaatttacgctgccaaaagaccctgaaacgccgcttatcatggtcggaccgggaacaggcgtcgcgccgtttagaggctttgtgcaggcgcgcaaacagctaaaagaacaaggacagtcacttggagaagcacatttatacttcggctgccgttcacctcatgaagactatctgtatcaagaagagcttgaaaacgcccaaagcgaaggcatcattacgcttcataccgctttttctcgcatgccaaatcagccgaaaacatacgttcagcacgtaatggaacaagacggcaagaaattgattgaacttcttgatcaaggagcgcacttctatatttgcggagacggaagccaaatggcacctgccgttgaagcaacgcttatgaaaagctatgctgacgttcaccaagtgagtgaagcagacgctcgcttatggctgcagcagctagaagaaaaaggccgatacgcaaaagacgtgtgggctgggtaa

SEQ ID NO: 102 - DNA, 3228 bp, Artificial Sequence
  BM3 variant (V78F, A82E, F87A, M184Y)
atgaaacatcaccatcaccatcaccccatgagcgattacgacatccccactactgagaatctttattttcagggcgccatggcaattaaagaaatgcctcagccaaaaacgtttggagagcttaaaaatttaccgttattaaacacagataaaccggttcaagctttgatgaaaattgcggatgaattaggagaaatctttaaattcgaggcgcctggtcgtgtaacgcgctacttatcaagtcagcgtctaattaaagaagcatgcgatgaatcacgctttgataaaaacttaagtcaagcgcttaaattttttcgtgattttgagggagacgggttagcaacaagctggacgcatgaaaaaaattggaaaaaagcgcataatatcttacttccaagcttcagtcagcaggcaatgaaaggctatcatgcgatgatggtcgatatcgccgtgcagcttgttcaaaagtgggagcgtctaaatgcagatgagcatattgaagtaccggaagacatgacacgtttaacgcttgatacaattggtctttgcggctttaactatcgctttaacagcttttaccgagatcagcctcatccatttattacaagtatggtccgtgcactggatgaatacatgaacaagctgcagcgagcaaatccagacgacccagcttatgatgaaaacaagcgccagtttcaagaagatatcaaggtgatgaacgacctagtagataaaattattgcagatcgcaaagcaagcggtgaacaaagcgatgatttattaacgcatatgctaaacggaaaagatccagaaacgggtgagccgcttgatgacgagaacattcgctatcaaattattacattcttaattgcgggacacgaaacaacaagtggtcttttatcatttgcgctgtatttcttagtgaaaaatccacatgtattacaaaaagcagcagaagaagcagcacgagttctagtagatcctgttccaagctacaaacaagtcaaacagcttaaatatgtcggcatggtcttaaacgaagcgctgcgcttatggccaactgctcctgcgttttccctatatgcaaaagaagatacggtgcttggaggagaatatcctttagaaaaaggcgacgaactaatggttctgattcctcagcttcaccgtgataaaacaatttggggagacgatgtggaagagttccgtccagagcgttttgaaaatccaagtgcgattccgcagcatgcgtttaaaccgtttggaaacggtcagcgtgcgtgtatcggtcagcagttcgctcttcatgaagcaacgctggtacttggtatgatgctaaaacactttgactttgaagatcatacaaactacgagctggatattaaagaaactttaacgttaaaacctgaaggctttgtggtaaaagcaaaatcgaaaaaaattccgcttggcggtattccttcacctagcactgaacagtctgctaaaaaagtacgcaaaaaggcagaaaacgctcataatacgccgctgcttgtgctatacggttcaaatatgggaacagctgaaggaacggcgcgtgatttagcagatattgcaatgagcaaaggatttgcaccgcaggtcgcaacgcttgattcacacgccggaaatcttccgcgcgaaggagctgtattaattgtaacggcgtcttataacggtcatccgcctgataacgcaaagcaatttgtcgactggttagaccaagcgtctgctgatgaagtaaaaggcgttcgctactccgtatttggatgcggcgataaaaactgggctactacgtatcaaaaagtgcctgcttttatcgatgaaacgcttgccgctaaaggggcagaaaacatcgctgaccgcggtgaagcagatgcaagcgacgactttgaaggcacatatgaagaatggcgtgaacatatgtggagtgacgtagcagcctactttaacctcgacattgaaaacagtgaagataataaatctactctttcacttcaatttgtcgacagcgccgcggatatgccgcttgcgaaaatgcacggtgcgttttcaacgaacgtcgtagcaagcaaagaacttcaacagccaggcagtgcacgaagcacgcgacatcttgaaattgaacttccaaaagaagcttcttatcaagaaggagatcatttaggtgttattcctcgcaactatgaaggaatagtaaaccgtgtaacagcaaggttcggcctagatgcatcacagcaaatccgtctggaagcagaagaagaaaaattagctcatttgccactcgctaaaacagtatccgtagaagagcttctgcaatacgtggagcttcaagatcctgttacgcgcacgcagcttcgcgcaatggctgctaaaacggtctgcccgccgcataaagtagagcttgaagccttgcttgaaaagcaagcctacaaagaacaagtgctggcaaaacgtttaacaatgcttgaactgcttgaaaaatacccggcgtgtgaaatgaaattcagcgaatttatcgcccttctgccaagcatacgcccgcgctattactcgatttcttcatcacctcgtgtcgatgaaaaacaagcaagcatcacggtcagcgttgtctcaggagaagcgtggagcggatatggagaatataaaggaattgcgtcgaactatcttgccgagctgcaagaaggagatacgattacgtgctttatttccacaccgcagtcagaatttacgctgccaaaagaccctgaaacgccgcttatcatggtcggaccgggaacaggcgtcgcgccgtttagaggctttgtgcaggcgcgcaaacagctaaaagaacaaggacagtcacttggagaagcacatttatacttcggctgccgttcacctcatgaagactatctgtatcaagaagagcttgaaaacgcccaaagcgaaggcatcattacgcttcataccgctttttctcgcatgccaaatcagccgaaaacatacgttcagcacgtaatggaacaagacggcaagaaattgattgaacttcttgatcaaggagcgcacttctatatttgcggagacggaagccaaatggcacctgccgttgaagcaacgcttatgaaaagctatgctgacgttcaccaagtgagtgaagcagacgctcgcttatggctgcagcagctagaagaaaaaggccgatacgcaaaagacgtgtgggctgggtaa

SEQ ID NO: 103 - DNA, 3228 bp, Artificial Sequence
  BM3 variant (V78L, A82E, F87A, M184Y)
atgaaacatcaccatcaccatcaccccatgagcgattacgacatccccactactgagaatctttattttcagggcgccatggcaattaaagaaatgcctcagccaaaaacgtttggagagcttaaaaatttaccgttattaaacacagataaaccggttcaagctttgatgaaaattgcggatgaattaggagaaatctttaaattcgaggcgcctggtcgtgtaacgcgctacttatcaagtcagcgtctaattaaagaagcatgcgatgaatcacgctttgataaaaacttaagtcaagcgcttaaatttctgcgtgattttgagggagacgggttagcaacaagctggacgcatgaaaaaaattggaaaaaagcgcataatatcttacttccaagcttcagtcagcaggcaatgaaaggctatcatgcgatgatggtcgatatcgccgtgcagcttgttcaaaagtgggagcgtctaaatgcagatgagcatattgaagtaccggaagacatgacacgtttaacgcttgatacaattggtctttgcggctttaactatcgctttaacagcttttaccgagatcagcctcatccatttattacaagtatggtccgtgcactggatgaatacatgaacaagctgcagcgagcaaatccagacgacccagcttatgatgaaaacaagcgccagtttcaagaagatatcaaggtgatgaacgacctagtagataaaattattgcagatcgcaaagcaagcggtgaacaaagcgatgatttattaacgcatatgctaaacggaaaagatccagaaacgggtgagccgcttgatgacgagaacattcgctatcaaattattacattcttaattgcgggacacgaaacaacaagtggtcttttatcatttgcgctgtatttcttagtgaaaaatccacatgtattacaaaaagcagcagaagaagcagcacgagttctagtagatcctgttccaagctacaaacaagtcaaacagcttaaatatgtcggcatggtcttaaacgaagcgctgcgcttatggccaactgctcctgcgttttccctatatgcaaaagaagatacggtgcttggaggagaatatcctttagaaaaaggcgacgaactaatggttctgattcctcagcttcaccgtgataaaacaatttggggagacgatgtggaagagttccgtccagagcgttttgaaaatccaagtgcgattccgcagcatgcgtttaaaccgtttggaaacggtcagcgtgcgtgtatcggtcagcagttcgctcttcatgaagcaacgctggtacttggtatgatgctaaaacactttgactttgaagatcatacaaactacgagctggatattaaagaaactttaacgttaaaacctgaaggctttgtggtaaaagcaaaatcgaaaaaaattccgcttggcggtattccttcacctagcactgaacagtctgctaaaaaagtacgcaaaaaggcagaaaacgctcataatacgccgctgcttgtgctatacggttcaaatatgggaacagctgaaggaacggcgcgtgatttagcagatattgcaatgagcaaaggatttgcaccgcaggtcgcaacgcttgattcacacgccggaaatcttccgcgcgaaggagctgtattaattgtaacggcgtcttataacggtcatccgcctgataacgcaaagcaatttgtcgactggttagaccaagcgtctgctgatgaagtaaaaggcgttcgctactccgtatttggatgcggcgataaaaactgggctactacgtatcaaaaagtgcctgcttttatcgatgaaacgcttgccgctaaaggggcagaaaacatcgctgaccgcggtgaagcagatgcaagcgacgactttgaaggcacatatgaagaatggcgtgaacatatgtggagtgacgtagcagcctactttaacctcgacattgaaaacagtgaagataataaatctactctttcacttcaatttgtcgacagcgccgcggatatgccgcttgcgaaaatgcacggtgcgttttcaacgaacgtcgtagcaagcaaagaacttcaacagccaggcagtgcacgaagcacgcgacatcttgaaattgaacttccaaaagaagcttcttatcaagaaggagatcatttaggtgttattcctcgcaactatgaaggaatagtaaaccgtgtaacagcaaggttcggcctagatgcatcacagcaaatccgtctggaagcagaagaagaaaaattagctcatttgccactcgctaaaacagtatccgtagaagagcttctgcaatacgtggagcttcaagatcctgttacgcgcacgcagcttcgcgcaatggctgctaaaacggtctgcccgccgcataaagtagagcttgaagccttgcttgaaaagcaagcctacaaagaacaagtgctggcaaaacgtttaacaatgcttgaactgcttgaaaaatacccggcgtgtgaaatgaaattcagcgaatttatcgcccttctgccaagcatacgcccgcgctattactcgatttcttcatcacctcgtgtcgatgaaaaacaagcaagcatcacggtcagcgttgtctcaggagaagcgtggagcggatatggagaatataaaggaattgcgtcgaactatcttgccgagctgcaagaaggagatacgattacgtgctttatttccacaccgcagtcagaatttacgctgccaaaagaccctgaaacgccgcttatcatggtcggaccgggaacaggcgtcgcgccgtttagaggctttgtgcaggcgcgcaaacagctaaaagaacaaggacagtcacttggagaagcacatttatacttcggctgccgttcacctcatgaagactatctgtatcaagaagagcttgaaaacgcccaaagcgaaggcatcattacgcttcataccgctttttctcgcatgccaaatcagccgaaaacatacgttcagcacgtaatggaacaagacggcaagaaattgattgaacttcttgatcaaggagcgcacttctatatttgcggagacggaagccaaatggcacctgccgttgaagcaacgcttatgaaaagctatgctgacgttcaccaagtgagtgaagcagacgctcgcttatggctgcagcagctagaagaaaaaggccgatacgcaaaagacgtgtgggctgggtaa

SEQ ID NO: 104 - DNA, 3228 bp, Artificial Sequence
  BM3 variant (V78I, A82E, F87A, M184Y)
atgaaacatcaccatcaccatcaccccatgagcgattacgacatccccactactgagaatctttattttcagggcgccatggcaattaaagaaatgcctcagccaaaaacgtttggagagcttaaaaatttaccgttattaaacacagataaaccggttcaagctttgatgaaaattgcggatgaattaggagaaatctttaaattcgaggcgcctggtcgtgtaacgcgctacttatcaagtcagcgtctaattaaagaagcatgcgatgaatcacgctttgataaaaacttaagtcaagcgcttaaatttattcgtgattttgagggagacgggttagcaacaagctggacgcatgaaaaaaattggaaaaaagcgcataatatcttacttccaagcttcagtcagcaggcaatgaaaggctatcatgcgatgatggtcgatatcgccgtgcagcttgttcaaaagtgggagcgtctaaatgcagatgagcatattgaagtaccggaagacatgacacgtttaacgcttgatacaattggtctttgcggctttaactatcgctttaacagcttttaccgagatcagcctcatccatttattacaagtatggtccgtgcactggatgaatacatgaacaagctgcagcgagcaaatccagacgacccagcttatgatgaaaacaagcgccagtttcaagaagatatcaaggtgatgaacgacctagtagataaaattattgcagatcgcaaagcaagcggtgaacaaagcgatgatttattaacgcatatgctaaacggaaaagatccagaaacgggtgagccgcttgatgacgagaacattcgctatcaaattattacattcttaattgcgggacacgaaacaacaagtggtcttttatcatttgcgctgtatttcttagtgaaaaatccacatgtattacaaaaagcagcagaagaagcagcacgagttctagtagatcctgttccaagctacaaacaagtcaaacagcttaaatatgtcggcatggtcttaaacgaagcgctgcgcttatggccaactgctcctgcgttttccctatatgcaaaagaagatacggtgcttggaggagaatatcctttagaaaaaggcgacgaactaatggttctgattcctcagcttcaccgtgataaaacaatttggggagacgatgtggaagagttccgtccagagcgttttgaaaatccaagtgcgattccgcagcatgcgtttaaaccgtttggaaacggtcagcgtgcgtgtatcggtcagcagttcgctcttcatgaagcaacgctggtacttggtatgatgctaaaacactttgactttgaagatcatacaaactacgagctggatattaaagaaactttaacgttaaaacctgaaggctttgtggtaaaagcaaaatcgaaaaaaattccgcttggcggtattccttcacctagcactgaacagtctgctaaaaaagtacgcaaaaaggcagaaaacgctcataatacgccgctgcttgtgctatacggttcaaatatgggaacagctgaaggaacggcgcgtgatttagcagatattgcaatgagcaaaggatttgcaccgcaggtcgcaacgcttgattcacacgccggaaatcttccgcgcgaaggagctgtattaattgtaacggcgtcttataacggtcatccgcctgataacgcaaagcaatttgtcgactggttagaccaagcgtctgctgatgaagtaaaaggcgttcgctactccgtatttggatgcggcgataaaaactgggctactacgtatcaaaaagtgcctgcttttatcgatgaaacgcttgccgctaaaggggcagaaaacatcgctgaccgcggtgaagcagatgcaagcgacgactttgaaggcacatatgaagaatggcgtgaacatatgtggagtgacgtagcagcctactttaacctcgacattgaaaacagtgaagataataaatctactctttcacttcaatttgtcgacagcgccgcggatatgccgcttgcgaaaatgcacggtgcgttttcaacgaacgtcgtagcaagcaaagaacttcaacagccaggcagtgcacgaagcacgcgacatcttgaaattgaacttccaaaagaagcttcttatcaagaaggagatcatttaggtgttattcctcgcaactatgaaggaatagtaaaccgtgtaacagcaaggttcggcctagatgcatcacagcaaatccgtctggaagcagaagaagaaaaattagctcatttgccactcgctaaaacagtatccgtagaagagcttctgcaatacgtggagcttcaagatcctgttacgcgcacgcagcttcgcgcaatggctgctaaaacggtctgcccgccgcataaagtagagcttgaagccttgcttgaaaagcaagcctacaaagaacaagtgctggcaaaacgtttaacaatgcttgaactgcttgaaaaatacccggcgtgtgaaatgaaattcagcgaatttatcgcccttctgccaagcatacgcccgcgctattactcgatttcttcatcacctcgtgtcgatgaaaaacaagcaagcatcacggtcagcgttgtctcaggagaagcgtggagcggatatggagaatataaaggaattgcgtcgaactatcttgccgagctgcaagaaggagatacgattacgtgctttatttccacaccgcagtcagaatttacgctgccaaaagaccctgaaacgccgcttatcatggtcggaccgggaacaggcgtcgcgccgtttagaggctttgtgcaggcgcgcaaacagctaaaagaacaaggacagtcacttggagaagcacatttatacttcggctgccgttcacctcatgaagactatctgtatcaagaagagcttgaaaacgcccaaagcgaaggcatcattacgcttcataccgctttttctcgcatgccaaatcagccgaaaacatacgttcagcacgtaatggaacaagacggcaagaaattgattgaacttcttgatcaaggagcgcacttctatatttgcggagacggaagccaaatggcacctgccgttgaagcaacgcttatgaaaagctatgctgacgttcaccaagtgagtgaagcagacgctcgcttatggctgcagcagctagaagaaaaaggccgatacgcaaaagacgtgtgggctgggtaa

SEQ ID NO: 105 - DNA, 3228 bp, Artificial Sequence
  BM3 variant (V78M, A82E, F87A, M184Y)
atgaaacatcaccatcaccatcaccccatgagcgattacgacatccccactactgagaatctttattttcagggcgccatggcaattaaagaaatgcctcagccaaaaacgtttggagagcttaaaaatttaccgttattaaacacagataaaccggttcaagctttgatgaaaattgcggatgaattaggagaaatctttaaattcgaggcgcctggtcgtgtaacgcgctacttatcaagtcagcgtctaattaaagaagcatgcgatgaatcacgctttgataaaaacttaagtcaagcgcttaaatttatgcgtgattttgagggagacgggttagcaacaagctggacgcatgaaaaaaattggaaaaaagcgcataatatcttacttccaagcttcagtcagcaggcaatgaaaggctatcatgcgatgatggtcgatatcgccgtgcagcttgttcaaaagtgggagcgtctaaatgcagatgagcatattgaagtaccggaagacatgacacgtttaacgcttgatacaattggtctttgcggctttaactatcgctttaacagcttttaccgagatcagcctcatccatttattacaagtatggtccgtgcactggatgaatacatgaacaagctgcagcgagcaaatccagacgacccagcttatgatgaaaacaagcgccagtttcaagaagatatcaaggtgatgaacgacctagtagataaaattattgcagatcgcaaagcaagcggtgaacaaagcgatgatttattaacgcatatgctaaacggaaaagatccagaaacgggtgagccgcttgatgacgagaacattcgctatcaaattattacattcttaattgcgggacacgaaacaacaagtggtcttttatcatttgcgctgtatttcttagtgaaaaatccacatgtattacaaaaagcagcagaagaagcagcacgagttctagtagatcctgttccaagctacaaacaagtcaaacagcttaaatatgtcggcatggtcttaaacgaagcgctgcgcttatggccaactgctcctgcgttttccctatatgcaaaagaagatacggtgcttggaggagaatatcctttagaaaaaggcgacgaactaatggttctgattcctcagcttcaccgtgataaaacaatttggggagacgatgtggaagagttccgtccagagcgttttgaaaatccaagtgcgattccgcagcatgcgtttaaaccgtttggaaacggtcagcgtgcgtgtatcggtcagcagttcgctcttcatgaagcaacgctggtacttggtatgatgctaaaacactttgactttgaagatcatacaaactacgagctggatattaaagaaactttaacgttaaaacctgaaggctttgtggtaaaagcaaaatcgaaaaaaattccgcttggcggtattccttcacctagcactgaacagtctgctaaaaaagtacgcaaaaaggcagaaaacgctcataatacgccgctgcttgtgctatacggttcaaatatgggaacagctgaaggaacggcgcgtgatttagcagatattgcaatgagcaaaggatttgcaccgcaggtcgcaacgcttgattcacacgccggaaatcttccgcgcgaaggagctgtattaattgtaacggcgtcttataacggtcatccgcctgataacgcaaagcaatttgtcgactggttagaccaagcgtctgctgatgaagtaaaaggcgttcgctactccgtatttggatgcggcgataaaaactgggctactacgtatcaaaaagtgcctgcttttatcgatgaaacgcttgccgctaaaggggcagaaaacatcgctgaccgcggtgaagcagatgcaagcgacgactttgaaggcacatatgaagaatggcgtgaacatatgtggagtgacgtagcagcctactttaacctcgacattgaaaacagtgaagataataaatctactctttcacttcaatttgtcgacagcgccgcggatatgccgcttgcgaaaatgcacggtgcgttttcaacgaacgtcgtagcaagcaaagaacttcaacagccaggcagtgcacgaagcacgcgacatcttgaaattgaacttccaaaagaagcttcttatcaagaaggagatcatttaggtgttattcctcgcaactatgaaggaatagtaaaccgtgtaacagcaaggttcggcctagatgcatcacagcaaatccgtctggaagcagaagaagaaaaattagctcatttgccactcgctaaaacagtatccgtagaagagcttctgcaatacgtggagcttcaagatcctgttacgcgcacgcagcttcgcgcaatggctgctaaaacggtctgcccgccgcataaagtagagcttgaagccttgcttgaaaagcaagcctacaaagaacaagtgctggcaaaacgtttaacaatgcttgaactgcttgaaaaatacccggcgtgtgaaatgaaattcagcgaatttatcgcccttctgccaagcatacgcccgcgctattactcgatttcttcatcacctcgtgtcgatgaaaaacaagcaagcatcacggtcagcgttgtctcaggagaagcgtggagcggatatggagaatataaaggaattgcgtcgaactatcttgccgagctgcaagaaggagatacgattacgtgctttatttccacaccgcagtcagaatttacgctgccaaaagaccctgaaacgccgcttatcatggtcggaccgggaacaggcgtcgcgccgtttagaggctttgtgcaggcgcgcaaacagctaaaagaacaaggacagtcacttggagaagcacatttatacttcggctgccgttcacctcatgaagactatctgtatcaagaagagcttgaaaacgcccaaagcgaaggcatcattacgcttcataccgctttttctcgcatgccaaatcagccgaaaacatacgttcagcacgtaatggaacaagacggcaagaaattgattgaacttcttgatcaaggagcgcacttctatatttgcggagacggaagccaaatggcacctgccgttgaagcaacgcttatgaaaagctatgctgacgttcaccaagtgagtgaagcagacgctcgcttatggctgcagcagctagaagaaaaaggccgatacgcaaaagacgtgtgggctgggtaa

SEQ ID NO: 106 - DNA, 3228 bp, Artificial Sequence
  BM3 variant (V78Y, A82E, F87A, M184Y)
atgaaacatcaccatcaccatcaccccatgagcgattacgacatccccactactgagaatctttattttcagggcgccatggcaattaaagaaatgcctcagccaaaaacgtttggagagcttaaaaatttaccgttattaaacacagataaaccggttcaagctttgatgaaaattgcggatgaattaggagaaatctttaaattcgaggcgcctggtcgtgtaacgcgctacttatcaagtcagcgtctaattaaagaagcatgcgatgaatcacgctttgataaaaacttaagtcaagcgcttaaattttatcgtgattttgagggagacgggttagcaacaagctggacgcatgaaaaaaattggaaaaaagcgcataatatcttacttccaagcttcagtcagcaggcaatgaaaggctatcatgcgatgatggtcgatatcgccgtgcagcttgttcaaaagtgggagcgtctaaatgcagatgagcatattgaagtaccggaagacatgacacgtttaacgcttgatacaattggtctttgcggctttaactatcgctttaacagcttttaccgagatcagcctcatccatttattacaagtatggtccgtgcactggatgaatacatgaacaagctgcagcgagcaaatccagacgacccagcttatgatgaaaacaagcgccagtttcaagaagatatcaaggtgatgaacgacctagtagataaaattattgcagatcgcaaagcaagcggtgaacaaagcgatgatttattaacgcatatgctaaacggaaaagatccagaaacgggtgagccgcttgatgacgagaacattcgctatcaaattattacattcttaattgcgggacacgaaacaacaagtggtcttttatcatttgcgctgtatttcttagtgaaaaatccacatgtattacaaaaagcagcagaagaagcagcacgagttctagtagatcctgttccaagctacaaacaagtcaaacagcttaaatatgtcggcatggtcttaaacgaagcgctgcgcttatggccaactgctcctgcgttttccctatatgcaaaagaagatacggtgcttggaggagaatatcctttagaaaaaggcgacgaactaatggttctgattcctcagcttcaccgtgataaaacaatttggggagacgatgtggaagagttccgtccagagcgttttgaaaatccaagtgcgattccgcagcatgcgtttaaaccgtttggaaacggtcagcgtgcgtgtatcggtcagcagttcgctcttcatgaagcaacgctggtacttggtatgatgctaaaacactttgactttgaagatcatacaaactacgagctggatattaaagaaactttaacgttaaaacctgaaggctttgtggtaaaagcaaaatcgaaaaaaattccgcttggcggtattccttcacctagcactgaacagtctgctaaaaaagtacgcaaaaaggcagaaaacgctcataatacgccgctgcttgtgctatacggttcaaatatgggaacagctgaaggaacggcgcgtgatttagcagatattgcaatgagcaaaggatttgcaccgcaggtcgcaacgcttgattcacacgccggaaatcttccgcgcgaaggagctgtattaattgtaacggcgtcttataacggtcatccgcctgataacgcaaagcaatttgtcgactggttagaccaagcgtctgctgatgaagtaaaaggcgttcgctactccgtatttggatgcggcgataaaaactgggctactacgtatcaaaaagtgcctgcttttatcgatgaaacgcttgccgctaaaggggcagaaaacatcgctgaccgcggtgaagcagatgcaagcgacgactttgaaggcacatatgaagaatggcgtgaacatatgtggagtgacgtagcagcctactttaacctcgacattgaaaacagtgaagataataaatctactctttcacttcaatttgtcgacagcgccgcggatatgccgcttgcgaaaatgcacggtgcgttttcaacgaacgtcgtagcaagcaaagaacttcaacagccaggcagtgcacgaagcacgcgacatcttgaaattgaacttccaaaagaagcttcttatcaagaaggagatcatttaggtgttattcctcgcaactatgaaggaatagtaaaccgtgtaacagcaaggttcggcctagatgcatcacagcaaatccgtctggaagcagaagaagaaaaattagctcatttgccactcgctaaaacagtatccgtagaagagcttctgcaatacgtggagcttcaagatcctgttacgcgcacgcagcttcgcgcaatggctgctaaaacggtctgcccgccgcataaagtagagcttgaagccttgcttgaaaagcaagcctacaaagaacaagtgctggcaaaacgtttaacaatgcttgaactgcttgaaaaatacccggcgtgtgaaatgaaattcagcgaatttatcgcccttctgccaagcatacgcccgcgctattactcgatttcttcatcacctcgtgtcgatgaaaaacaagcaagcatcacggtcagcgttgtctcaggagaagcgtggagcggatatggagaatataaaggaattgcgtcgaactatcttgccgagctgcaagaaggagatacgattacgtgctttatttccacaccgcagtcagaatttacgctgccaaaagaccctgaaacgccgcttatcatggtcggaccgggaacaggcgtcgcgccgtttagaggctttgtgcaggcgcgcaaacagctaaaagaacaaggacagtcacttggagaagcacatttatacttcggctgccgttcacctcatgaagactatctgtatcaagaagagcttgaaaacgcccaaagcgaaggcatcattacgcttcataccgctttttctcgcatgccaaatcagccgaaaacatacgttcagcacgtaatggaacaagacggcaagaaattgattgaacttcttgatcaaggagcgcacttctatatttgcggagacggaagccaaatggcacctgccgttgaagcaacgcttatgaaaagctatgctgacgttcaccaagtgagtgaagcagacgctcgcttatggctgcagcagctagaagaaaaaggccgatacgcaaaagacgtgtgggctgggtaa

SEQ ID NO: 107 - DNA, 3228 bp, Artificial Sequence
  BM3 variant (V78F, A82P, F87A, M184Y)
atgaaacatcaccatcaccatcaccccatgagcgattacgacatccccactactgagaatctttattttcagggcgccatggcaattaaagaaatgcctcagccaaaaacgtttggagagcttaaaaatttaccgttattaaacacagataaaccggttcaagctttgatgaaaattgcggatgaattaggagaaatctttaaattcgaggcgcctggtcgtgtaacgcgctacttatcaagtcagcgtctaattaaagaagcatgcgatgaatcacgctttgataaaaacttaagtcaagcgcttaaattttttcgtgattttcctggagacgggttagcaacaagctggacgcatgaaaaaaattggaaaaaagcgcataatatcttacttccaagcttcagtcagcaggcaatgaaaggctatcatgcgatgatggtcgatatcgccgtgcagcttgttcaaaagtgggagcgtctaaatgcagatgagcatattgaagtaccggaagacatgacacgtttaacgcttgatacaattggtctttgcggctttaactatcgctttaacagcttttaccgagatcagcctcatccatttattacaagtatggtccgtgcactggatgaatatatgaacaagctgcagcgagcaaatccagacgacccagcttatgatgaaaacaagcgccagtttcaagaagatatcaaggtgatgaacgacctagtagataaaattattgcagatcgcaaagcaagcggtgaacaaagcgatgatttattaacgcatatgctaaacggaaaagatccagaaacgggtgagccgcttgatgacgagaacattcgctatcaaattattacattcttaattgcgggacacgaaacaacaagtggtcttttatcatttgcgctgtatttcttagtgaaaaatccacatgtattacaaaaagcagcagaagaagcagcacgagttctagtagatcctgttccaagctacaaacaagtcaaacagcttaaatatgtcggcatggtcttaaacgaagcgctgcgcttatggccaactgctcctgcgttttccctatatgcaaaagaagatacggtgcttggaggagaatatcctttagaaaaaggcgacgaactaatggttctgattcctcagcttcaccgtgataaaacaatttggggagacgatgtggaagagttccgtccagagcgttttgaaaatccaagtgcgattccgcagcatgcgtttaaaccgtttggaaacggtcagcgtgcgtgtatcggtcagcagttcgctcttcatgaagcaacgctggtacttggtatgatgctaaaacactttgactttgaagatcatacaaactacgagctggatattaaagaaactttaacgttaaaacctgaaggctttgtggtaaaagcaaaatcgaaaaaaattccgcttggcggtattccttcacctagcactgaacagtctgctaaaaaagtacgcaaaaaggcagaaaacgctcataatacgccgctgcttgtgctatacggttcaaatatgggaacagctgaaggaacggcgcgtgatttagcagatattgcaatgagcaaaggatttgcaccgcaggtcgcaacgcttgattcacacgccggaaatcttccgcgcgaaggagctgtattaattgtaacggcgtcttataacggtcatccgcctgataacgcaaagcaatttgtcgactggttagaccaagcgtctgctgatgaagtaaaaggcgttcgctactccgtatttggatgcggcgataaaaactgggctactacgtatcaaaaagtgcctgcttttatcgatgaaacgcttgccgctaaaggggcagaaaacatcgctgaccgcggtgaagcagatgcaagcgacgactttgaaggcacatatgaagaatggcgtgaacatatgtggagtgacgtagcagcctactttaacctcgacattgaaaacagtgaagataataaatctactctttcacttcaatttgtcgacagcgccgcggatatgccgcttgcgaaaatgcacggtgcgttttcaacgaacgtcgtagcaagcaaagaacttcaacagccaggcagtgcacgaagcacgcgacatcttgaaattgaacttccaaaagaagcttcttatcaagaaggagatcatttaggtgttattcctcgcaactatgaaggaatagtaaaccgtgtaacagcaaggttcggcctagatgcatcacagcaaatccgtctggaagcagaagaagaaaaattagctcatttgccactcgctaaaacagtatccgtagaagagcttctgcaatacgtggagcttcaagatcctgttacgcgcacgcagcttcgcgcaatggctgctaaaacggtctgcccgccgcataaagtagagcttgaagccttgcttgaaaagcaagcctacaaagaacaagtgctggcaaaacgtttaacaatgcttgaactgcttgaaaaatacccggcgtgtgaaatgaaattcagcgaatttatcgcccttctgccaagcatacgcccgcgctattactcgatttcttcatcacctcgtgtcgatgaaaaacaagcaagcatcacggtcagcgttgtctcaggagaagcgtggagcggatatggagaatataaaggaattgcgtcgaactatcttgccgagctgcaagaaggagatacgattacgtgctttatttccacaccgcagtcagaatttacgctgccaaaagaccctgaaacgccgcttatcatggtcggaccgggaacaggcgtcgcgccgtttagaggctttgtgcaggcgcgcaaacagctaaaagaacaaggacagtcacttggagaagcacatttatacttcggctgccgttcacctcatgaagactatctgtatcaagaagagcttgaaaacgcccaaagcgaaggcatcattacgcttcataccgctttttctcgcatgccaaatcagccgaaaacatacgttcagcacgtaatggaacaagacggcaagaaattgattgaacttcttgatcaaggagcgcacttctatatttgcggagacggaagccaaatggcacctgccgttgaagcaacgcttatgaaaagctatgctgacgttcaccaagtgagtgaagcagacgctcgcttatggctgcagcagctagaagaaaaaggccgatacgcaaaagacgtgtgggctgggtaa

SEQ ID NO: 108 - DNA, 3228 bp, Artificial Sequence
  BM3 variant (V78L, A82P, F87A, M184Y)
atgaaacatcaccatcaccatcaccccatgagcgattacgacatccccactactgagaatctttattttcagggcgccatggcaattaaagaaatgcctcagccaaaaacgtttggagagcttaaaaatttaccgttattaaacacagataaaccggttcaagctttgatgaaaattgcggatgaattaggagaaatctttaaattcgaggcgcctggtcgtgtaacgcgctacttatcaagtcagcgtctaattaaagaagcatgcgatgaatcacgctttgataaaaacttaagtcaagcgcttaaatttctgcgtgattttcctggagacgggttagcaacaagctggacgcatgaaaaaaattggaaaaaagcgcataatatcttacttccaagcttcagtcagcaggcaatgaaaggctatcatgcgatgatggtcgatatcgccgtgcagcttgttcaaaagtgggagcgtctaaatgcagatgagcatattgaagtaccggaagacatgacacgtttaacgcttgatacaattggtctttgcggctttaactatcgctttaacagcttttaccgagatcagcctcatccatttattacaagtatggtccgtgcactggatgaatatatgaacaagctgcagcgagcaaatccagacgacccagcttatgatgaaaacaagcgccagtttcaagaagatatcaaggtgatgaacgacctagtagataaaattattgcagatcgcaaagcaagcggtgaacaaagcgatgatttattaacgcatatgctaaacggaaaagatccagaaacgggtgagccgcttgatgacgagaacattcgctatcaaattattacattcttaattgcgggacacgaaacaacaagtggtcttttatcatttgcgctgtatttcttagtgaaaaatccacatgtattacaaaaagcagcagaagaagcagcacgagttctagtagatcctgttccaagctacaaacaagtcaaacagcttaaatatgtcggcatggtcttaaacgaagcgctgcgcttatggccaactgctcctgcgttttccctatatgcaaaagaagatacggtgcttggaggagaatatcctttagaaaaaggcgacgaactaatggttctgattcctcagcttcaccgtgataaaacaatttggggagacgatgtggaagagttccgtccagagcgttttgaaaatccaagtgcgattccgcagcatgcgtttaaaccgtttggaaacggtcagcgtgcgtgtatcggtcagcagttcgctcttcatgaagcaacgctggtacttggtatgatgctaaaacactttgactttgaagatcatacaaactacgagctggatattaaagaaactttaacgttaaaacctgaaggctttgtggtaaaagcaaaatcgaaaaaaattccgcttggcggtattccttcacctagcactgaacagtctgctaaaaaagtacgcaaaaaggcagaaaacgctcataatacgccgctgcttgtgctatacggttcaaatatgggaacagctgaaggaacggcgcgtgatttagcagatattgcaatgagcaaaggatttgcaccgcaggtcgcaacgcttgattcacacgccggaaatcttccgcgcgaaggagctgtattaattgtaacggcgtcttataacggtcatccgcctgataacgcaaagcaatttgtcgactggttagaccaagcgtctgctgatgaagtaaaaggcgttcgctactccgtatttggatgcggcgataaaaactgggctactacgtatcaaaaagtgcctgcttttatcgatgaaacgcttgccgctaaaggggcagaaaacatcgctgaccgcggtgaagcagatgcaagcgacgactttgaaggcacatatgaagaatggcgtgaacatatgtggagtgacgtagcagcctactttaacctcgacattgaaaacagtgaagataataaatctactctttcacttcaatttgtcgacagcgccgcggatatgccgcttgcgaaaatgcacggtgcgttttcaacgaacgtcgtagcaagcaaagaacttcaacagccaggcagtgcacgaagcacgcgacatcttgaaattgaacttccaaaagaagcttcttatcaagaaggagatcatttaggtgttattcctcgcaactatgaaggaatagtaaaccgtgtaacagcaaggttcggcctagatgcatcacagcaaatccgtctggaagcagaagaagaaaaattagctcatttgccactcgctaaaacagtatccgtagaagagcttctgcaatacgtggagcttcaagatcctgttacgcgcacgcagcttcgcgcaatggctgctaaaacggtctgcccgccgcataaagtagagcttgaagccttgcttgaaaagcaagcctacaaagaacaagtgctggcaaaacgtttaacaatgcttgaactgcttgaaaaatacccggcgtgtgaaatgaaattcagcgaatttatcgcccttctgccaagcatacgcccgcgctattactcgatttcttcatcacctcgtgtcgatgaaaaacaagcaagcatcacggtcagcgttgtctcaggagaagcgtggagcggatatggagaatataaaggaattgcgtcgaactatcttgccgagctgcaagaaggagatacgattacgtgctttatttccacaccgcagtcagaatttacgctgccaaaagaccctgaaacgccgcttatcatggtcggaccgggaacaggcgtcgcgccgtttagaggctttgtgcaggcgcgcaaacagctaaaagaacaaggacagtcacttggagaagcacatttatacttcggctgccgttcacctcatgaagactatctgtatcaagaagagcttgaaaacgcccaaagcgaaggcatcattacgcttcataccgctttttctcgcatgccaaatcagccgaaaacatacgttcagcacgtaatggaacaagacggcaagaaattgattgaacttcttgatcaaggagcgcacttctatatttgcggagacggaagccaaatggcacctgccgttgaagcaacgcttatgaaaagctatgctgacgttcaccaagtgagtgaagcagacgctcgcttatggctgcagcagctagaagaaaaaggccgatacgcaaaagacgtgtgggctgggtaa

SEQ ID NO: 109 - DNA, 3228 bp, Artificial Sequence
  BM3 variant (V78I, A82P, F87A, M184Y)
atgaaacatcaccatcaccatcaccccatgagcgattacgacatccccactactgagaatctttattttcagggcgccatggcaattaaagaaatgcctcagccaaaaacgtttggagagcttaaaaatttaccgttattaaacacagataaaccggttcaagctttgatgaaaattgcggatgaattaggagaaatctttaaattcgaggcgcctggtcgtgtaacgcgctacttatcaagtcagcgtctaattaaagaagcatgcgatgaatcacgctttgataaaaacttaagtcaagcgcttaaatttattcgtgattttcctggagacgggttagcaacaagctggacgcatgaaaaaaattggaaaaaagcgcataatatcttacttccaagcttcagtcagcaggcaatgaaaggctatcatgcgatgatggtcgatatcgccgtgcagcttgttcaaaagtgggagcgtctaaatgcagatgagcatattgaagtaccggaagacatgacacgtttaacgcttgatacaattggtctttgcggctttaactatcgctttaacagcttttaccgagatcagcctcatccatttattacaagtatggtccgtgcactggatgaatatatgaacaagctgcagcgagcaaatccagacgacccagcttatgatgaaaacaagcgccagtttcaagaagatatcaaggtgatgaacgacctagtagataaaattattgcagatcgcaaagcaagcggtgaacaaagcgatgatttattaacgcatatgctaaacggaaaagatccagaaacgggtgagccgcttgatgacgagaacattcgctatcaaattattacattcttaattgcgggacacgaaacaacaagtggtcttttatcatttgcgctgtatttcttagtgaaaaatccacatgtattacaaaaagcagcagaagaagcagcacgagttctagtagatcctgttccaagctacaaacaagtcaaacagcttaaatatgtcggcatggtcttaaacgaagcgctgcgcttatggccaactgctcctgcgttttccctatatgcaaaagaagatacggtgcttggaggagaatatcctttagaaaaaggcgacgaactaatggttctgattcctcagcttcaccgtgataaaacaatttggggagacgatgtggaagagttccgtccagagcgttttgaaaatccaagtgcgattccgcagcatgcgtttaaaccgtttggaaacggtcagcgtgcgtgtatcggtcagcagttcgctcttcatgaagcaacgctggtacttggtatgatgctaaaacactttgactttgaagatcatacaaactacgagctggatattaaagaaactttaacgttaaaacctgaaggctttgtggtaaaagcaaaatcgaaaaaaattccgcttggcggtattccttcacctagcactgaacagtctgctaaaaaagtacgcaaaaaggcagaaaacgctcataatacgccgctgcttgtgctatacggttcaaatatgggaacagctgaaggaacggcgcgtgatttagcagatattgcaatgagcaaaggatttgcaccgcaggtcgcaacgcttgattcacacgccggaaatcttccgcgcgaaggagctgtattaattgtaacggcgtcttataacggtcatccgcctgataacgcaaagcaatttgtcgactggttagaccaagcgtctgctgatgaagtaaaaggcgttcgctactccgtatttggatgcggcgataaaaactgggctactacgtatcaaaaagtgcctgcttttatcgatgaaacgcttgccgctaaaggggcagaaaacatcgctgaccgcggtgaagcagatgcaagcgacgactttgaaggcacatatgaagaatggcgtgaacatatgtggagtgacgtagcagcctactttaacctcgacattgaaaacagtgaagataataaatctactctttcacttcaatttgtcgacagcgccgcggatatgccgcttgcgaaaatgcacggtgcgttttcaacgaacgtcgtagcaagcaaagaacttcaacagccaggcagtgcacgaagcacgcgacatcttgaaattgaacttccaaaagaagcttcttatcaagaaggagatcatttaggtgttattcctcgcaactatgaaggaatagtaaaccgtgtaacagcaaggttcggcctagatgcatcacagcaaatccgtctggaagcagaagaagaaaaattagctcatttgccactcgctaaaacagtatccgtagaagagcttctgcaatacgtggagcttcaagatcctgttacgcgcacgcagcttcgcgcaatggctgctaaaacggtctgcccgccgcataaagtagagcttgaagccttgcttgaaaagcaagcctacaaagaacaagtgctggcaaaacgtttaacaatgcttgaactgcttgaaaaatacccggcgtgtgaaatgaaattcagcgaatttatcgcccttctgccaagcatacgcccgcgctattactcgatttcttcatcacctcgtgtcgatgaaaaacaagcaagcatcacggtcagcgttgtctcaggagaagcgtggagcggatatggagaatataaaggaattgcgtcgaactatcttgccgagctgcaagaaggagatacgattacgtgctttatttccacaccgcagtcagaatttacgctgccaaaagaccctgaaacgccgcttatcatggtcggaccgggaacaggcgtcgcgccgtttagaggctttgtgcaggcgcgcaaacagctaaaagaacaaggacagtcacttggagaagcacatttatacttcggctgccgttcacctcatgaagactatctgtatcaagaagagcttgaaaacgcccaaagcgaaggcatcattacgcttcataccgctttttctcgcatgccaaatcagccgaaaacatacgttcagcacgtaatggaacaagacggcaagaaattgattgaacttcttgatcaaggagcgcacttctatatttgcggagacggaagccaaatggcacctgccgttgaagcaacgcttatgaaaagctatgctgacgttcaccaagtgagtgaagcagacgctcgcttatggctgcagcagctagaagaaaaaggccgatacgcaaaagacgtgtgggctgggtaa

SEQ ID NO: 110 - DNA, 3228 bp, Artificial Sequence
  BM3 variant (V78M, A82P, F87A, M184Y)
atgaaacatcaccatcaccatcaccccatgagcgattacgacatccccactactgagaatctttattttcagggcgccatggcaattaaagaaatgcctcagccaaaaacgtttggagagcttaaaaatttaccgttattaaacacagataaaccggttcaagctttgatgaaaattgcggatgaattaggagaaatctttaaattcgaggcgcctggtcgtgtaacgcgctacttatcaagtcagcgtctaattaaagaagcatgcgatgaatcacgctttgataaaaacttaagtcaagcgcttaaatttatgcgtgattttcctggagacgggttagcaacaagctggacgcatgaaaaaaattggaaaaaagcgcataatatcttacttccaagcttcagtcagcaggcaatgaaaggctatcatgcgatgatggtcgatatcgccgtgcagcttgttcaaaagtgggagcgtctaaatgcagatgagcatattgaagtaccggaagacatgacacgtttaacgcttgatacaattggtctttgcggctttaactatcgctttaacagcttttaccgagatcagcctcatccatttattacaagtatggtccgtgcactggatgaatatatgaacaagctgcagcgagcaaatccagacgacccagcttatgatgaaaacaagcgccagtttcaagaagatatcaaggtgatgaacgacctagtagataaaattattgcagatcgcaaagcaagcggtgaacaaagcgatgatttattaacgcatatgctaaacggaaaagatccagaaacgggtgagccgcttgatgacgagaacattcgctatcaaattattacattcttaattgcgggacacgaaacaacaagtggtcttttatcatttgcgctgtatttcttagtgaaaaatccacatgtattacaaaaagcagcagaagaagcagcacgagttctagtagatcctgttccaagctacaaacaagtcaaacagcttaaatatgtcggcatggtcttaaacgaagcgctgcgcttatggccaactgctcctgcgttttccctatatgcaaaagaagatacggtgcttggaggagaatatcctttagaaaaaggcgacgaactaatggttctgattcctcagcttcaccgtgataaaacaatttggggagacgatgtggaagagttccgtccagagcgttttgaaaatccaagtgcgattccgcagcatgcgtttaaaccgtttggaaacggtcagcgtgcgtgtatcggtcagcagttcgctcttcatgaagcaacgctggtacttggtatgatgctaaaacactttgactttgaagatcatacaaactacgagctggatattaaagaaactttaacgttaaaacctgaaggctttgtggtaaaagcaaaatcgaaaaaaattccgcttggcggtattccttcacctagcactgaacagtctgctaaaaaagtacgcaaaaaggcagaaaacgctcataatacgccgctgcttgtgctatacggttcaaatatgggaacagctgaaggaacggcgcgtgatttagcagatattgcaatgagcaaaggatttgcaccgcaggtcgcaacgcttgattcacacgccggaaatcttccgcgcgaaggagctgtattaattgtaacggcgtcttataacggtcatccgcctgataacgcaaagcaatttgtcgactggttagaccaagcgtctgctgatgaagtaaaaggcgttcgctactccgtatttggatgcggcgataaaaactgggctactacgtatcaaaaagtgcctgcttttatcgatgaaacgcttgccgctaaaggggcagaaaacatcgctgaccgcggtgaagcagatgcaagcgacgactttgaaggcacatatgaagaatggcgtgaacatatgtggagtgacgtagcagcctactttaacctcgacattgaaaacagtgaagataataaatctactctttcacttcaatttgtcgacagcgccgcggatatgccgcttgcgaaaatgcacggtgcgttttcaacgaacgtcgtagcaagcaaagaacttcaacagccaggcagtgcacgaagcacgcgacatcttgaaattgaacttccaaaagaagcttcttatcaagaaggagatcatttaggtgttattcctcgcaactatgaaggaatagtaaaccgtgtaacagcaaggttcggcctagatgcatcacagcaaatccgtctggaagcagaagaagaaaaattagctcatttgccactcgctaaaacagtatccgtagaagagcttctgcaatacgtggagcttcaagatcctgttacgcgcacgcagcttcgcgcaatggctgctaaaacggtctgcccgccgcataaagtagagcttgaagccttgcttgaaaagcaagcctacaaagaacaagtgctggcaaaacgtttaacaatgcttgaactgcttgaaaaatacccggcgtgtgaaatgaaattcagcgaatttatcgcccttctgccaagcatacgcccgcgctattactcgatttcttcatcacctcgtgtcgatgaaaaacaagcaagcatcacggtcagcgttgtctcaggagaagcgtggagcggatatggagaatataaaggaattgcgtcgaactatcttgccgagctgcaagaaggagatacgattacgtgctttatttccacaccgcagtcagaatttacgctgccaaaagaccctgaaacgccgcttatcatggtcggaccgggaacaggcgtcgcgccgtttagaggctttgtgcaggcgcgcaaacagctaaaagaacaaggacagtcacttggagaagcacatttatacttcggctgccgttcacctcatgaagactatctgtatcaagaagagcttgaaaacgcccaaagcgaaggcatcattacgcttcataccgctttttctcgcatgccaaatcagccgaaaacatacgttcagcacgtaatggaacaagacggcaagaaattgattgaacttcttgatcaaggagcgcacttctatatttgcggagacggaagccaaatggcacctgccgttgaagcaacgcttatgaaaagctatgctgacgttcaccaagtgagtgaagcagacgctcgcttatggctgcagcagctagaagaaaaaggccgatacgcaaaagacgtgtgggctgggtaa

SEQ ID NO: 111 - DNA, 3228 bp, Artificial Sequence
  BM3 variant (V78Y, A82P, F87A, M184Y)
atgaaacatcaccatcaccatcaccccatgagcgattacgacatccccactactgagaatctttattttcagggcgccatggcaattaaagaaatgcctcagccaaaaacgtttggagagcttaaaaatttaccgttattaaacacagataaaccggttcaagctttgatgaaaattgcggatgaattaggagaaatctttaaattcgaggcgcctggtcgtgtaacgcgctacttatcaagtcagcgtctaattaaagaagcatgcgatgaatcacgctttgataaaaacttaagtcaagcgcttaaattttatcgtgattttcctggagacgggttagcaacaagctggacgcatgaaaaaaattggaaaaaagcgcataatatcttacttccaagcttcagtcagcaggcaatgaaaggctatcatgcgatgatggtcgatatcgccgtgcagcttgttcaaaagtgggagcgtctaaatgcagatgagcatattgaagtaccggaagacatgacacgtttaacgcttgatacaattggtctttgcggctttaactatcgctttaacagcttttaccgagatcagcctcatccatttattacaagtatggtccgtgcactggatgaatatatgaacaagctgcagcgagcaaatccagacgacccagcttatgatgaaaacaagcgccagtttcaagaagatatcaaggtgatgaacgacctagtagataaaattattgcagatcgcaaagcaagcggtgaacaaagcgatgatttattaacgcatatgctaaacggaaaagatccagaaacgggtgagccgcttgatgacgagaacattcgctatcaaattattacattcttaattgcgggacacgaaacaacaagtggtcttttatcatttgcgctgtatttcttagtgaaaaatccacatgtattacaaaaagcagcagaagaagcagcacgagttctagtagatcctgttccaagctacaaacaagtcaaacagcttaaatatgtcggcatggtcttaaacgaagcgctgcgcttatggccaactgctcctgcgttttccctatatgcaaaagaagatacggtgcttggaggagaatatcctttagaaaaaggcgacgaactaatggttctgattcctcagcttcaccgtgataaaacaatttggggagacgatgtggaagagttccgtccagagcgttttgaaaatccaagtgcgattccgcagcatgcgtttaaaccgtttggaaacggtcagcgtgcgtgtatcggtcagcagttcgctcttcatgaagcaacgctggtacttggtatgatgctaaaacactttgactttgaagatcatacaaactacgagctggatattaaagaaactttaacgttaaaacctgaaggctttgtggtaaaagcaaaatcgaaaaaaattccgcttggcggtattccttcacctagcactgaacagtctgctaaaaaagtacgcaaaaaggcagaaaacgctcataatacgccgctgcttgtgctatacggttcaaatatgggaacagctgaaggaacggcgcgtgatttagcagatattgcaatgagcaaaggatttgcaccgcaggtcgcaacgcttgattcacacgccggaaatcttccgcgcgaaggagctgtattaattgtaacggcgtcttataacggtcatccgcctgataacgcaaagcaatttgtcgactggttagaccaagcgtctgctgatgaagtaaaaggcgttcgctactccgtatttggatgcggcgataaaaactgggctactacgtatcaaaaagtgcctgcttttatcgatgaaacgcttgccgctaaaggggcagaaaacatcgctgaccgcggtgaagcagatgcaagcgacgactttgaaggcacatatgaagaatggcgtgaacatatgtggagtgacgtagcagcctactttaacctcgacattgaaaacagtgaagataataaatctactctttcacttcaatttgtcgacagcgccgcggatatgccgcttgcgaaaatgcacggtgcgttttcaacgaacgtcgtagcaagcaaagaacttcaacagccaggcagtgcacgaagcacgcgacatcttgaaattgaacttccaaaagaagcttcttatcaagaaggagatcatttaggtgttattcctcgcaactatgaaggaatagtaaaccgtgtaacagcaaggttcggcctagatgcatcacagcaaatccgtctggaagcagaagaagaaaaattagctcatttgccactcgctaaaacagtatccgtagaagagcttctgcaatacgtggagcttcaagatcctgttacgcgcacgcagcttcgcgcaatggctgctaaaacggtctgcccgccgcataaagtagagcttgaagccttgcttgaaaagcaagcctacaaagaacaagtgctggcaaaacgtttaacaatgcttgaactgcttgaaaaatacccggcgtgtgaaatgaaattcagcgaatttatcgcccttctgccaagcatacgcccgcgctattactcgatttcttcatcacctcgtgtcgatgaaaaacaagcaagcatcacggtcagcgttgtctcaggagaagcgtggagcggatatggagaatataaaggaattgcgtcgaactatcttgccgagctgcaagaaggagatacgattacgtgctttatttccacaccgcagtcagaatttacgctgccaaaagaccctgaaacgccgcttatcatggtcggaccgggaacaggcgtcgcgccgtttagaggctttgtgcaggcgcgcaaacagctaaaagaacaaggacagtcacttggagaagcacatttatacttcggctgccgttcacctcatgaagactatctgtatcaagaagagcttgaaaacgcccaaagcgaaggcatcattacgcttcataccgctttttctcgcatgccaaatcagccgaaaacatacgttcagcacgtaatggaacaagacggcaagaaattgattgaacttcttgatcaaggagcgcacttctatatttgcggagacggaagccaaatggcacctgccgttgaagcaacgcttatgaaaagctatgctgacgttcaccaagtgagtgaagcagacgctcgcttatggctgcagcagctagaagaaaaaggccgatacgcaaaagacgtgtgggctgggtaa

SEQ ID NO: 112 - DNA, 3228 bp, Artificial Sequence
  BM3 variant (V78F, A82Q, F87A, M184Y)
atgaaacatcaccatcaccatcaccccatgagcgattacgacatccccactactgagaatctttattttcagggcgccatggcaattaaagaaatgcctcagccaaaaacgtttggagagcttaaaaatttaccgttattaaacacagataaaccggttcaagctttgatgaaaattgcggatgaattaggagaaatctttaaattcgaggcgcctggtcgtgtaacgcgctacttatcaagtcagcgtctaattaaagaagcatgcgatgaatcacgctttgataaaaacttaagtcaagcgcttaaattttttcgtgattttcagggagacgggttagcaacaagctggacgcatgaaaaaaattggaaaaaagcgcataatatcttacttccaagcttcagtcagcaggcaatgaaaggctatcatgcgatgatggtcgatatcgccgtgcagcttgttcaaaagtgggagcgtctaaatgcagatgagcatattgaagtaccggaagacatgacacgtttaacgcttgatacaattggtctttgcggctttaactatcgctttaacagcttttaccgagatcagcctcatccatttattacaagtatggtccgtgcactggatgaatatatgaacaagctgcagcgagcaaatccagacgacccagcttatgatgaaaacaagcgccagtttcaagaagatatcaaggtgatgaacgacctagtagataaaattattgcagatcgcaaagcaagcggtgaacaaagcgatgatttattaacgcatatgctaaacggaaaagatccagaaacgggtgagccgcttgatgacgagaacattcgctatcaaattattacattcttaattgcgggacacgaaacaacaagtggtcttttatcatttgcgctgtatttcttagtgaaaaatccacatgtattacaaaaagcagcagaagaagcagcacgagttctagtagatcctgttccaagctacaaacaagtcaaacagcttaaatatgtcggcatggtcttaaacgaagcgctgcgcttatggccaactgctcctgcgttttccctatatgcaaaagaagatacggtgcttggaggagaatatcctttagaaaaaggcgacgaactaatggttctgattcctcagcttcaccgtgataaaacaatttggggagacgatgtggaagagttccgtccagagcgttttgaaaatccaagtgcgattccgcagcatgcgtttaaaccgtttggaaacggtcagcgtgcgtgtatcggtcagcagttcgctcttcatgaagcaacgctggtacttggtatgatgctaaaacactttgactttgaagatcatacaaactacgagctggatattaaagaaactttaacgttaaaacctgaaggctttgtggtaaaagcaaaatcgaaaaaaattccgcttggcggtattccttcacctagcactgaacagtctgctaaaaaagtacgcaaaaaggcagaaaacgctcataatacgccgctgcttgtgctatacggttcaaatatgggaacagctgaaggaacggcgcgtgatttagcagatattgcaatgagcaaaggatttgcaccgcaggtcgcaacgcttgattcacacgccggaaatcttccgcgcgaaggagctgtattaattgtaacggcgtcttataacggtcatccgcctgataacgcaaagcaatttgtcgactggttagaccaagcgtctgctgatgaagtaaaaggcgttcgctactccgtatttggatgcggcgataaaaactgggctactacgtatcaaaaagtgcctgcttttatcgatgaaacgcttgccgctaaaggggcagaaaacatcgctgaccgcggtgaagcagatgcaagcgacgactttgaaggcacatatgaagaatggcgtgaacatatgtggagtgacgtagcagcctactttaacctcgacattgaaaacagtgaagataataaatctactctttcacttcaatttgtcgacagcgccgcggatatgccgcttgcgaaaatgcacggtgcgttttcaacgaacgtcgtagcaagcaaagaacttcaacagccaggcagtgcacgaagcacgcgacatcttgaaattgaacttccaaaagaagcttcttatcaagaaggagatcatttaggtgttattcctcgcaactatgaaggaatagtaaaccgtgtaacagcaaggttcggcctagatgcatcacagcaaatccgtctggaagcagaagaagaaaaattagctcatttgccactcgctaaaacagtatccgtagaagagcttctgcaatacgtggagcttcaagatcctgttacgcgcacgcagcttcgcgcaatggctgctaaaacggtctgcccgccgcataaagtagagcttgaagccttgcttgaaaagcaagcctacaaagaacaagtgctggcaaaacgtttaacaatgcttgaactgcttgaaaaatacccggcgtgtgaaatgaaattcagcgaatttatcgcccttctgccaagcatacgcccgcgctattactcgatttcttcatcacctcgtgtcgatgaaaaacaagcaagcatcacggtcagcgttgtctcaggagaagcgtggagcggatatggagaatataaaggaattgcgtcgaactatcttgccgagctgcaagaaggagatacgattacgtgctttatttccacaccgcagtcagaatttacgctgccaaaagaccctgaaacgccgcttatcatggtcggaccgggaacaggcgtcgcgccgtttagaggctttgtgcaggcgcgcaaacagctaaaagaacaaggacagtcacttggagaagcacatttatacttcggctgccgttcacctcatgaagactatctgtatcaagaagagcttgaaaacgcccaaagcgaaggcatcattacgcttcataccgctttttctcgcatgccaaatcagccgaaaacatacgttcagcacgtaatggaacaagacggcaagaaattgattgaacttcttgatcaaggagcgcacttctatatttgcggagacggaagccaaatggcacctgccgttgaagcaacgcttatgaaaagctatgctgacgttcaccaagtgagtgaagcagacgctcgcttatggctgcagcagctagaagaaaaaggccgatacgcaaaagacgtgtgggctgggtaa

SEQ ID NO: 113 - DNA, 3228 bp, Artificial Sequence
  BM3 variant (V78L, A82Q, F87A, M184Y)
atgaaacatcaccatcaccatcaccccatgagcgattacgacatccccactactgagaatctttattttcagggcgccatggcaattaaagaaatgcctcagccaaaaacgtttggagagcttaaaaatttaccgttattaaacacagataaaccggttcaagctttgatgaaaattgcggatgaattaggagaaatctttaaattcgaggcgcctggtcgtgtaacgcgctacttatcaagtcagcgtctaattaaagaagcatgcgatgaatcacgctttgataaaaacttaagtcaagcgcttaaatttctgcgtgattttcagggagacgggttagcaacaagctggacgcatgaaaaaaattggaaaaaagcgcataatatcttacttccaagcttcagtcagcaggcaatgaaaggctatcatgcgatgatggtcgatatcgccgtgcagcttgttcaaaagtgggagcgtctaaatgcagatgagcatattgaagtaccggaagacatgacacgtttaacgcttgatacaattggtctttgcggctttaactatcgctttaacagcttttaccgagatcagcctcatccatttattacaagtatggtccgtgcactggatgaatatatgaacaagctgcagcgagcaaatccagacgacccagcttatgatgaaaacaagcgccagtttcaagaagatatcaaggtgatgaacgacctagtagataaaattattgcagatcgcaaagcaagcggtgaacaaagcgatgatttattaacgcatatgctaaacggaaaagatccagaaacgggtgagccgcttgatgacgagaacattcgctatcaaattattacattcttaattgcgggacacgaaacaacaagtggtcttttatcatttgcgctgtatttcttagtgaaaaatccacatgtattacaaaaagcagcagaagaagcagcacgagttctagtagatcctgttccaagctacaaacaagtcaaacagcttaaatatgtcggcatggtcttaaacgaagcgctgcgcttatggccaactgctcctgcgttttccctatatgcaaaagaagatacggtgcttggaggagaatatcctttagaaaaaggcgacgaactaatggttctgattcctcagcttcaccgtgataaaacaatttggggagacgatgtggaagagttccgtccagagcgttttgaaaatccaagtgcgattccgcagcatgcgtttaaaccgtttggaaacggtcagcgtgcgtgtatcggtcagcagttcgctcttcatgaagcaacgctggtacttggtatgatgctaaaacactttgactttgaagatcatacaaactacgagctggatattaaagaaactttaacgttaaaacctgaaggctttgtggtaaaagcaaaatcgaaaaaaattccgcttggcggtattccttcacctagcactgaacagtctgctaaaaaagtacgcaaaaaggcagaaaacgctcataatacgccgctgcttgtgctatacggttcaaatatgggaacagctgaaggaacggcgcgtgatttagcagatattgcaatgagcaaaggatttgcaccgcaggtcgcaacgcttgattcacacgccggaaatcttccgcgcgaaggagctgtattaattgtaacggcgtcttataacggtcatccgcctgataacgcaaagcaatttgtcgactggttagaccaagcgtctgctgatgaagtaaaaggcgttcgctactccgtatttggatgcggcgataaaaactgggctactacgtatcaaaaagtgcctgcttttatcgatgaaacgcttgccgctaaaggggcagaaaacatcgctgaccgcggtgaagcagatgcaagcgacgactttgaaggcacatatgaagaatggcgtgaacatatgtggagtgacgtagcagcctactttaacctcgacattgaaaacagtgaagataataaatctactctttcacttcaatttgtcgacagcgccgcggatatgccgcttgcgaaaatgcacggtgcgttttcaacgaacgtcgtagcaagcaaagaacttcaacagccaggcagtgcacgaagcacgcgacatcttgaaattgaacttccaaaagaagcttcttatcaagaaggagatcatttaggtgttattcctcgcaactatgaaggaatagtaaaccgtgtaacagcaaggttcggcctagatgcatcacagcaaatccgtctggaagcagaagaagaaaaattagctcatttgccactcgctaaaacagtatccgtagaagagcttctgcaatacgtggagcttcaagatcctgttacgcgcacgcagcttcgcgcaatggctgctaaaacggtctgcccgccgcataaagtagagcttgaagccttgcttgaaaagcaagcctacaaagaacaagtgctggcaaaacgtttaacaatgcttgaactgcttgaaaaatacccggcgtgtgaaatgaaattcagcgaatttatcgcccttctgccaagcatacgcccgcgctattactcgatttcttcatcacctcgtgtcgatgaaaaacaagcaagcatcacggtcagcgttgtctcaggagaagcgtggagcggatatggagaatataaaggaattgcgtcgaactatcttgccgagctgcaagaaggagatacgattacgtgctttatttccacaccgcagtcagaatttacgctgccaaaagaccctgaaacgccgcttatcatggtcggaccgggaacaggcgtcgcgccgtttagaggctttgtgcaggcgcgcaaacagctaaaagaacaaggacagtcacttggagaagcacatttatacttcggctgccgttcacctcatgaagactatctgtatcaagaagagcttgaaaacgcccaaagcgaaggcatcattacgcttcataccgctttttctcgcatgccaaatcagccgaaaacatacgttcagcacgtaatggaacaagacggcaagaaattgattgaacttcttgatcaaggagcgcacttctatatttgcggagacggaagccaaatggcacctgccgttgaagcaacgcttatgaaaagctatgctgacgttcaccaagtgagtgaagcagacgctcgcttatggctgcagcagctagaagaaaaaggccgatacgcaaaagacgtgtgggctgggtaa

SEQ ID NO: 114 - DNA, 3228 bp, Artificial Sequence
  BM3 variant (V78I, A82Q, F87A, M184Y)
atgaaacatcaccatcaccatcaccccatgagcgattacgacatccccactactgagaatctttattttcagggcgccatggcaattaaagaaatgcctcagccaaaaacgtttggagagcttaaaaatttaccgttattaaacacagataaaccggttcaagctttgatgaaaattgcggatgaattaggagaaatctttaaattcgaggcgcctggtcgtgtaacgcgctacttatcaagtcagcgtctaattaaagaagcatgcgatgaatcacgctttgataaaaacttaagtcaagcgcttaaatttattcgtgattttcagggagacgggttagcaacaagctggacgcatgaaaaaaattggaaaaaagcgcataatatcttacttccaagcttcagtcagcaggcaatgaaaggctatcatgcgatgatggtcgatatcgccgtgcagcttgttcaaaagtgggagcgtctaaatgcagatgagcatattgaagtaccggaagacatgacacgtttaacgcttgatacaattggtctttgcggctttaactatcgctttaacagcttttaccgagatcagcctcatccatttattacaagtatggtccgtgcactggatgaatatatgaacaagctgcagcgagcaaatccagacgacccagcttatgatgaaaacaagcgccagtttcaagaagatatcaaggtgatgaacgacctagtagataaaattattgcagatcgcaaagcaagcggtgaacaaagcgatgatttattaacgcatatgctaaacggaaaagatccagaaacgggtgagccgcttgatgacgagaacattcgctatcaaattattacattcttaattgcgggacacgaaacaacaagtggtcttttatcatttgcgctgtatttcttagtgaaaaatccacatgtattacaaaaagcagcagaagaagcagcacgagttctagtagatcctgttccaagctacaaacaagtcaaacagcttaaatatgtcggcatggtcttaaacgaagcgctgcgcttatggccaactgctcctgcgttttccctatatgcaaaagaagatacggtgcttggaggagaatatcctttagaaaaaggcgacgaactaatggttctgattcctcagcttcaccgtgataaaacaatttggggagacgatgtggaagagttccgtccagagcgttttgaaaatccaagtgcgattccgcagcatgcgtttaaaccgtttggaaacggtcagcgtgcgtgtatcggtcagcagttcgctcttcatgaagcaacgctggtacttggtatgatgctaaaacactttgactttgaagatcatacaaactacgagctggatattaaagaaactttaacgttaaaacctgaaggctttgtggtaaaagcaaaatcgaaaaaaattccgcttggcggtattccttcacctagcactgaacagtctgctaaaaaagtacgcaaaaaggcagaaaacgctcataatacgccgctgcttgtgctatacggttcaaatatgggaacagctgaaggaacggcgcgtgatttagcagatattgcaatgagcaaaggatttgcaccgcaggtcgcaacgcttgattcacacgccggaaatcttccgcgcgaaggagctgtattaattgtaacggcgtcttataacggtcatccgcctgataacgcaaagcaatttgtcgactggttagaccaagcgtctgctgatgaagtaaaaggcgttcgctactccgtatttggatgcggcgataaaaactgggctactacgtatcaaaaagtgcctgcttttatcgatgaaacgcttgccgctaaaggggcagaaaacatcgctgaccgcggtgaagcagatgcaagcgacgactttgaaggcacatatgaagaatggcgtgaacatatgtggagtgacgtagcagcctactttaacctcgacattgaaaacagtgaagataataaatctactctttcacttcaatttgtcgacagcgccgcggatatgccgcttgcgaaaatgcacggtgcgttttcaacgaacgtcgtagcaagcaaagaacttcaacagccaggcagtgcacgaagcacgcgacatcttgaaattgaacttccaaaagaagcttcttatcaagaaggagatcatttaggtgttattcctcgcaactatgaaggaatagtaaaccgtgtaacagcaaggttcggcctagatgcatcacagcaaatccgtctggaagcagaagaagaaaaattagctcatttgccactcgctaaaacagtatccgtagaagagcttctgcaatacgtggagcttcaagatcctgttacgcgcacgcagcttcgcgcaatggctgctaaaacggtctgcccgccgcataaagtagagcttgaagccttgcttgaaaagcaagcctacaaagaacaagtgctggcaaaacgtttaacaatgcttgaactgcttgaaaaatacccggcgtgtgaaatgaaattcagcgaatttatcgcccttctgccaagcatacgcccgcgctattactcgatttcttcatcacctcgtgtcgatgaaaaacaagcaagcatcacggtcagcgttgtctcaggagaagcgtggagcggatatggagaatataaaggaattgcgtcgaactatcttgccgagctgcaagaaggagatacgattacgtgctttatttccacaccgcagtcagaatttacgctgccaaaagaccctgaaacgccgcttatcatggtcggaccgggaacaggcgtcgcgccgtttagaggctttgtgcaggcgcgcaaacagctaaaagaacaaggacagtcacttggagaagcacatttatacttcggctgccgttcacctcatgaagactatctgtatcaagaagagcttgaaaacgcccaaagcgaaggcatcattacgcttcataccgctttttctcgcatgccaaatcagccgaaaacatacgttcagcacgtaatggaacaagacggcaagaaattgattgaacttcttgatcaaggagcgcacttctatatttgcggagacggaagccaaatggcacctgccgttgaagcaacgcttatgaaaagctatgctgacgttcaccaagtgagtgaagcagacgctcgcttatggctgcagcagctagaagaaaaaggccgatacgcaaaagacgtgtgggctgggtaa

SEQ ID NO: 115 - DNA, 3228 bp, Artificial Sequence
  BM3 variant (V78M, A82Q, F87A, M184Y)
atgaaacatcaccatcaccatcaccccatgagcgattacgacatccccactactgagaatctttattttcagggcgccatggcaattaaagaaatgcctcagccaaaaacgtttggagagcttaaaaatttaccgttattaaacacagataaaccggttcaagctttgatgaaaattgcggatgaattaggagaaatctttaaattcgaggcgcctggtcgtgtaacgcgctacttatcaagtcagcgtctaattaaagaagcatgcgatgaatcacgctttgataaaaacttaagtcaagcgcttaaatttatgcgtgattttcagggagacgggttagcaacaagctggacgcatgaaaaaaattggaaaaaagcgcataatatcttacttccaagcttcagtcagcaggcaatgaaaggctatcatgcgatgatggtcgatatcgccgtgcagcttgttcaaaagtgggagcgtctaaatgcagatgagcatattgaagtaccggaagacatgacacgtttaacgcttgatacaattggtctttgcggctttaactatcgctttaacagcttttaccgagatcagcctcatccatttattacaagtatggtccgtgcactggatgaatatatgaacaagctgcagcgagcaaatccagacgacccagcttatgatgaaaacaagcgccagtttcaagaagatatcaaggtgatgaacgacctagtagataaaattattgcagatcgcaaagcaagcggtgaacaaagcgatgatttattaacgcatatgctaaacggaaaagatccagaaacgggtgagccgcttgatgacgagaacattcgctatcaaattattacattcttaattgcgggacacgaaacaacaagtggtcttttatcatttgcgctgtatttcttagtgaaaaatccacatgtattacaaaaagcagcagaagaagcagcacgagttctagtagatcctgttccaagctacaaacaagtcaaacagcttaaatatgtcggcatggtcttaaacgaagcgctgcgcttatggccaactgctcctgcgttttccctatatgcaaaagaagatacggtgcttggaggagaatatcctttagaaaaaggcgacgaactaatggttctgattcctcagcttcaccgtgataaaacaatttggggagacgatgtggaagagttccgtccagagcgttttgaaaatccaagtgcgattccgcagcatgcgtttaaaccgtttggaaacggtcagcgtgcgtgtatcggtcagcagttcgctcttcatgaagcaacgctggtacttggtatgatgctaaaacactttgactttgaagatcatacaaactacgagctggatattaaagaaactttaacgttaaaacctgaaggctttgtggtaaaagcaaaatcgaaaaaaattccgcttggcggtattccttcacctagcactgaacagtctgctaaaaaagtacgcaaaaaggcagaaaacgctcataatacgccgctgcttgtgctatacggttcaaatatgggaacagctgaaggaacggcgcgtgatttagcagatattgcaatgagcaaaggatttgcaccgcaggtcgcaacgcttgattcacacgccggaaatcttccgcgcgaaggagctgtattaattgtaacggcgtcttataacggtcatccgcctgataacgcaaagcaatttgtcgactggttagaccaagcgtctgctgatgaagtaaaaggcgttcgctactccgtatttggatgcggcgataaaaactgggctactacgtatcaaaaagtgcctgcttttatcgatgaaacgcttgccgctaaaggggcagaaaacatcgctgaccgcggtgaagcagatgcaagcgacgactttgaaggcacatatgaagaatggcgtgaacatatgtggagtgacgtagcagcctactttaacctcgacattgaaaacagtgaagataataaatctactctttcacttcaatttgtcgacagcgccgcggatatgccgcttgcgaaaatgcacggtgcgttttcaacgaacgtcgtagcaagcaaagaacttcaacagccaggcagtgcacgaagcacgcgacatcttgaaattgaacttccaaaagaagcttcttatcaagaaggagatcatttaggtgttattcctcgcaactatgaaggaatagtaaaccgtgtaacagcaaggttcggcctagatgcatcacagcaaatccgtctggaagcagaagaagaaaaattagctcatttgccactcgctaaaacagtatccgtagaagagcttctgcaatacgtggagcttcaagatcctgttacgcgcacgcagcttcgcgcaatggctgctaaaacggtctgcccgccgcataaagtagagcttgaagccttgcttgaaaagcaagcctacaaagaacaagtgctggcaaaacgtttaacaatgcttgaactgcttgaaaaatacccggcgtgtgaaatgaaattcagcgaatttatcgcccttctgccaagcatacgcccgcgctattactcgatttcttcatcacctcgtgtcgatgaaaaacaagcaagcatcacggtcagcgttgtctcaggagaagcgtggagcggatatggagaatataaaggaattgcgtcgaactatcttgccgagctgcaagaaggagatacgattacgtgctttatttccacaccgcagtcagaatttacgctgccaaaagaccctgaaacgccgcttatcatggtcggaccgggaacaggcgtcgcgccgtttagaggctttgtgcaggcgcgcaaacagctaaaagaacaaggacagtcacttggagaagcacatttatacttcggctgccgttcacctcatgaagactatctgtatcaagaagagcttgaaaacgcccaaagcgaaggcatcattacgcttcataccgctttttctcgcatgccaaatcagccgaaaacatacgttcagcacgtaatggaacaagacggcaagaaattgattgaacttcttgatcaaggagcgcacttctatatttgcggagacggaagccaaatggcacctgccgttgaagcaacgcttatgaaaagctatgctgacgttcaccaagtgagtgaagcagacgctcgcttatggctgcagcagctagaagaaaaaggccgatacgcaaaagacgtgtgggctgggtaa

SEQ ID NO: 116 - DNA, 3228 bp, Artificial Sequence
  BM3 variant (V78Y, A82Q, F87A, M184Y)
atgaaacatcaccatcaccatcaccccatgagcgattacgacatccccactactgagaatctttattttcagggcgccatggcaattaaagaaatgcctcagccaaaaacgtttggagagcttaaaaatttaccgttattaaacacagataaaccggttcaagctttgatgaaaattgcggatgaattaggagaaatctttaaattcgaggcgcctggtcgtgtaacgcgctacttatcaagtcagcgtctaattaaagaagcatgcgatgaatcacgctttgataaaaacttaagtcaagcgcttaaattttatcgtgattttcagggagacgggttagcaacaagctggacgcatgaaaaaaattggaaaaaagcgcataatatcttacttccaagcttcagtcagcaggcaatgaaaggctatcatgcgatgatggtcgatatcgccgtgcagcttgttcaaaagtgggagcgtctaaatgcagatgagcatattgaagtaccggaagacatgacacgtttaacgcttgatacaattggtctttgcggctttaactatcgctttaacagcttttaccgagatcagcctcatccatttattacaagtatggtccgtgcactggatgaatatatgaacaagctgcagcgagcaaatccagacgacccagcttatgatgaaaacaagcgccagtttcaagaagatatcaaggtgatgaacgacctagtagataaaattattgcagatcgcaaagcaagcggtgaacaaagcgatgatttattaacgcatatgctaaacggaaaagatccagaaacgggtgagccgcttgatgacgagaacattcgctatcaaattattacattcttaattgcgggacacgaaacaacaagtggtcttttatcatttgcgctgtatttcttagtgaaaaatccacatgtattacaaaaagcagcagaagaagcagcacgagttctagtagatcctgttccaagctacaaacaagtcaaacagcttaaatatgtcggcatggtcttaaacgaagcgctgcgcttatggccaactgctcctgcgttttccctatatgcaaaagaagatacggtgcttggaggagaatatcctttagaaaaaggcgacgaactaatggttctgattcctcagcttcaccgtgataaaacaatttggggagacgatgtggaagagttccgtccagagcgttttgaaaatccaagtgcgattccgcagcatgcgtttaaaccgtttggaaacggtcagcgtgcgtgtatcggtcagcagttcgctcttcatgaagcaacgctggtacttggtatgatgctaaaacactttgactttgaagatcatacaaactacgagctggatattaaagaaactttaacgttaaaacctgaaggctttgtggtaaaagcaaaatcgaaaaaaattccgcttggcggtattccttcacctagcactgaacagtctgctaaaaaagtacgcaaaaaggcagaaaacgctcataatacgccgctgcttgtgctatacggttcaaatatgggaacagctgaaggaacggcgcgtgatttagcagatattgcaatgagcaaaggatttgcaccgcaggtcgcaacgcttgattcacacgccggaaatcttccgcgcgaaggagctgtattaattgtaacggcgtcttataacggtcatccgcctgataacgcaaagcaatttgtcgactggttagaccaagcgtctgctgatgaagtaaaaggcgttcgctactccgtatttggatgcggcgataaaaactgggctactacgtatcaaaaagtgcctgcttttatcgatgaaacgcttgccgctaaaggggcagaaaacatcgctgaccgcggtgaagcagatgcaagcgacgactttgaaggcacatatgaagaatggcgtgaacatatgtggagtgacgtagcagcctactttaacctcgacattgaaaacagtgaagataataaatctactctttcacttcaatttgtcgacagcgccgcggatatgccgcttgcgaaaatgcacggtgcgttttcaacgaacgtcgtagcaagcaaagaacttcaacagccaggcagtgcacgaagcacgcgacatcttgaaattgaacttccaaaagaagcttcttatcaagaaggagatcatttaggtgttattcctcgcaactatgaaggaatagtaaaccgtgtaacagcaaggttcggcctagatgcatcacagcaaatccgtctggaagcagaagaagaaaaattagctcatttgccactcgctaaaacagtatccgtagaagagcttctgcaatacgtggagcttcaagatcctgttacgcgcacgcagcttcgcgcaatggctgctaaaacggtctgcccgccgcataaagtagagcttgaagccttgcttgaaaagcaagcctacaaagaacaagtgctggcaaaacgtttaacaatgcttgaactgcttgaaaaatacccggcgtgtgaaatgaaattcagcgaatttatcgcccttctgccaagcatacgcccgcgctattactcgatttcttcatcacctcgtgtcgatgaaaaacaagcaagcatcacggtcagcgttgtctcaggagaagcgtggagcggatatggagaatataaaggaattgcgtcgaactatcttgccgagctgcaagaaggagatacgattacgtgctttatttccacaccgcagtcagaatttacgctgccaaaagaccctgaaacgccgcttatcatggtcggaccgggaacaggcgtcgcgccgtttagaggctttgtgcaggcgcgcaaacagctaaaagaacaaggacagtcacttggagaagcacatttatacttcggctgccgttcacctcatgaagactatctgtatcaagaagagcttgaaaacgcccaaagcgaaggcatcattacgcttcataccgctttttctcgcatgccaaatcagccgaaaacatacgttcagcacgtaatggaacaagacggcaagaaattgattgaacttcttgatcaaggagcgcacttctatatttgcggagacggaagccaaatggcacctgccgttgaagcaacgcttatgaaaagctatgctgacgttcaccaagtgagtgaagcagacgctcgcttatggctgcagcagctagaagaaaaaggccgatacgcaaaagacgtgtgggctgggtaa

SEQ ID NO: 117 - protein, 1048 aa, Artificial Sequence
  BM3 variant
AIKEMPQPKTFGELKNLPLLNTDKPVQALMKIADELGEIFKFEAPGRVTRYLSSQRLIKEACDESRFDKNLGQALKFLRDFEGDGLATSWTHEKNWKKAHNILLPSFSQQAMKGYHAMMVDIAVQLVQKWERLNADEHIEVPEDMTRLTLDTIGLCGFNYRFNSFYRDQPHPFITSYPRAYDEYMNKFQRANPDDPAYDENKRQFQEDIKVMNDLVDKIIADRKASGEQSDDLLTHMLNGKDPETGEPLDDENIRYQIITFLIAGHETTSGLLSFALYFLVKNPHVLQKAAEEAARVLVDPVPSYKQVKQLKYVGMVLNEALRLWPTAPAFSLYAKEDTVLGGEYPLEKGDELMVLIPQLHRDKTIWGDDVEEFRPERFENPSAIPQHAFKPFGNGQRACIGQQFALHEATLVLGMMLKHFDFEDHTNYELDIKETLTLKPEGFVVKAKSKKIPLGGIPSPSTEQSAKKVRKKAENAHNTPLLVLYGSNMGTAEGTARDLADIAMSKGFAPQVATLDSHAGNLPREGAVLIVTASYNGHPPDNAKQFVDWLDQASADEVKGVRYSVFGCGDKNWATTYQKVPAFIDETLAAKGAENIADRGEADASDDFEGTYEEWREHMWSDVAAYFNLDIENSEDNKSTLSLQFVDSAADMPLAKMHGAFSTNVVASKELQQPGSARSTRHLEIELPKEASYQEGDHLGVIPRNYEGIVNRVTARFGLDASQQIRLEAEEEKLAHLPLAKTVSVEELLQYVELQDPVTRTQLRAMAAKTVCPPHKVELEALLEKQAYKEQVLAKRLTMLELLEKYPACEMKFSEFIALLPSIRPRYYSISSSPRVDEKQASITVSVVSGEAWSGYGEYKGIASNYLAELQEGDTITCFISTPQSEFTLPKDPETPLIMVGPGTGVAPFRGFVQARKQLKEQGQSLGEAHLYFGCRSPHEDYLYQEELENAQSEGIITLHTAFSRMPNQPKTYVQHVMEQDGKKLIELLDQGAHFYICGDGSQMAPAVEATLMKSYADVHQVSEADARLWLQQLEEKGRYAKDVWAG

SEQ ID NO: 118 - protein, 1048 aa, Artificial Sequence
  BM3 variant
AIKEMPQPKTFGELKNLPLLNTDKPVQALMKIADELGEIFKFEAPGRVTRYLSSQRLIKEACDESRFDKNLGQALKFLRDFEGDGLATSWTHEKNWKKAHNILLPSFSQQAMKGYHAMMVDIAVQLVQKWERLNADEHIEVPEDMFRLTLDTIGLCGFNYRFNSFYRDQPHPFITSYWRAYDEYMNKLQRANPDDPAYDENKRQFQEDIKVMNDLVDKIIADRKASGEQSDDLLTHMLNGKDPETGEPLDDENIRYQIITFLIAGHETTSGLLSFALYFLVKNPHVLQKAAEEAARVLVDPVPSYKQVKQLKYVGMVLNEALRLWPTAPAFSLYAKEDTVLGGEYPLEKGDELMVLIPQLHRDKTIWGDDVEEFRPERFENPSAIPQHAFKPFGNGQRACIGQQFALHEATLVLGMMLKHFDFEDHTNYELDIKETLTLKPEGFVVKAKSKKIPLGGIPSPSTEQSAKKVRKKAENAHNTPLLVLYGSNMGTAEGTARDLADIAMSKGFAPQVATLDSHAGNLPREGAVLIVTASYNGHPPDNAKQFVDWLDQASADEVKGVRYSVFGCGDKNWATTYQKVPAFIDETLAAKGAENIADRGEADASDDFEGTYEEWREHMWSDVAAYFNLDIENSEDNKSTLSLQFVDSAADMPLAKMHGAFSTNVVASKELQQPGSARSTRHLEIELPKEASYQEGDHLGVIPRNYEGIVNRVTARFGLDASQQIRLEAEEEKLAHLPLAKTVSVEELLQYVELQDPVTRTQLRAMAAKTVCPPHKVELEALLEKQAYKEQVLAKRLTMLELLEKYPACEMKFSEFIALLPSIRPRYYSISSSPRVDEKQASITVSVVSGEAWSGYGEYKGIASNYLAELQEGDTITCFISTPQSEFTLPKDPETPLIMVGPGTGVAPFRGFVQARKQLKEQGQSLGEAHLYFGCRSPHEDYLYQEELENAQSEGIITLHTAFSRMPNQPKTYVQHVMEQDGKKLIELLDQGAHFYICGDGSQMAPAVEATLMKSYADVHQVSEADARLWLQQLEEKGRYAKDVWAG

SEQ ID NO: 119 - protein, 1048 aa, Artificial Sequence
  BM3 variant
AIKEMPQPKTFGELKNLPLLNTDKPVQALMKIADELGEIFKFEAPGRVTRYLSSQRLIKEACDESRFDKNLGQALKFLRDFEGDGLATSWTHEKNWKKAHNILLPSFSQQAMKGYHAMMVDIAVQLVQKWERLNADEHIEVPEDMFRLTLDTIGLCGFNYRFNSFYRDQPHPFITSYWRAYDEYMNKLQRANPDDPAYDENKRQFQEDIKVMNDLVDKIIADRKASGEQSDDLLTHMLNGKDPETGEPLDDENIRYQIITFLIAGHETTSGLLSFALYFLVKNPHVLQKAAEEAARVLVDPVPSYKQVKQLKYVGMVLNEALRLWPTAPAFSLYAKEDTVLGGEYPLEKGDELMVLIPQLHRDKTIWGDDVEEFRPERFENPSAIPQHAFKPFGNGQRACIGQQFALHEATLVLGMMLKHFDFEDHTNYELDIKETLTLKPEGFVVKAKSKKIPLGSGPSPSTEQSAKKVRKKAENNHNTPLLVLYGSNMGTAEGTARDLADIAMSKGFAPQVATLDSHAGNLPREGAVLIVTASYNGHPPDNAKQFVDWLDQASADEVKGVRYSVFGCGDKNWATTYQKVPAFIDETLAAKGAENIADRGEADASDDFEGTYEEWREHMWSDVAAYFNLDIENSEDNKSTLSLQFVDSAADMPLAKMHGAFSTNVVASKELQQPGSARSTRHLEIELPKEASYQEGDHLGVIPRNYEGIVNRVTARFGLDASQQIRLEAEEEKLAHLPLAKTVSVEELLQYVELQDPVTRTQLRAMAAKTVCPPHKVELEALLEKQAYKEQVLAKRLTMLELLEKYPACEMKFSEFIALLPSIRPRYYSISSSPRVDEKQASITVSVVSGEAWSGYGEYKGIASNYLAELQEGDTITCFISTPQSEFTLPKDPETPLIMVGPGTGVAPFRGFVQARKQLKEQGQSLGEAHLYFGCRSPHEDYLYQEELENAQSEGIITLHTAFSRMPNQPKTYVQHVMEQDGKKLIELLDQGAHFYICGDGSQMAPAVEATLMKSYADVHQVSEADARLWLQQLEEKGRYAKDVWAG

SEQ ID NO: 120 - DNA, 3147 bp, Artificial Sequence
  BM3 variant
gcaattaaagaaatgccgcagccgaaaacctttggcgaactgaaaaatctgccgctgctgaataccgataaaccggttcaggcactgatgaaaattgcagatgaactgggcgagatctttaaattcgaagcaccgggtcgtgttacccgttatctgagcagccagcgtctgattaaagaagcatgcgacgaaagccgctttgataaaaatctgggtcaagcactgaaatttctgcgcgattttgaaggtgatggtctggcaaccagctggacccatgaaaaaaactggaaaaaagcccataatattctgctgccgagctttagccagcaggcaatgaaaggttatcatgcaatgatggttgatattgccgttcagctggttcagaaatgggaacgtctgaatgccgatgaacatattgaagttccggaagatatgacccgtctgaccctggataccattggtctgtgtggttttaactatcgcttcaacagcttttatcgtgatcagccgcatccgtttattaccagctatccgcgtgcatatgacgagtatatgaacaaatttcagcgtgccaatccggatgatccggcatatgatgaaaacaaacgtcagtttcaagaggatatcaaggtgatgaatgatctggtggataaaatcattgcagatcgtaaagcaagcggtgaacagagtgatgatctgctgacccatatgctgaatggtaaagatccggaaaccggtgaaccgctggatgatgagaatattcgttatcagattatcacctttctgatcgcaggtcatgaaaccaccagtggtctgctgagctttgcactgtattttctggttaaaaatccgcacgtgctgcagaaagcagccgaagaagcagcacgcgttctggttgatccggttccgagctataaacaggttaaacagctgaaatatgttggcatggttctgaatgaagcactgcgtctgtggccgaccgcaccggcatttagcctgtatgcaaaagaagataccgttcttggcggtgaatatccgctggaaaaaggtgacgaactgatggtgctgattccgcagctgcatcgtgataaaaccatttggggtgatgatgtggaagaatttcgtccggaacgttttgaaaatccgagcgcaatcccgcagcatgcatttaaaccgtttggtaatggtcagcgtgcatgtattggtcagcagtttgcactgcatgaagcaaccctggttctgggtatgatgctgaaacattttgattttgaggaccacaccaactatgagctggatatcaaagaaaccctgacactgaaaccggaaggttttgttgttaaagccaagagcaaaaaaatcccgttaggtggtattccgagtccgagcaccgaacagagcgcaaaaaaagttcgtaaaaaagccgaaaatgcccataacacaccgctgctggttctgtatggtagcaatatgggtacagccgaaggcaccgcacgtgatctggcagatattgcaatgagtaaaggttttgcaccgcaggttgcaacactggatagccatgcaggtaatctgcctcgtgaaggtgcagttctgattgttaccgcaagctataatggtcatccgcctgataatgcaaaacagtttgttgattggctggatcaggcaagcgcagatgaagttaaaggtgttcgttatagcgtttttggttgcggtgacaaaaattgggcaaccacctatcagaaagttccggcttttattgatgaaaccctggcagcaaaaggtgcagaaaatattgccgatcgcggtgaagcagatgcaagtgatgactttgaaggcacctatgaagaatggcgtgaacacatgtggtcagatgttgcagcctattttaacctggatatcgaaaacagcgaggacaataaaagtaccctgagcctgcagtttgtggatagcgcagcagatatgccgctggccaaaatgcatggtgcatttagcaccaatgttgttgcaagcaaagaactgcagcagcctggtagcgcacgtagcacccgtcatctggaaattgaactgccgaaagaagcaagctatcaagagggtgatcatctgggtgttattccgcgtaattatgaaggtattgttaatcgtgtgaccgcacgttttggtctggatgcaagccagcagattcgtctggaagcagaagaagaaaaactggcacatctgcctctggcaaaaaccgttagcgttgaggaactgctgcaatatgtggaactgcaggatccggttacacgtacccagctgcgtgcaatggcagccaaaaccgtgtgtccgcctcataaagttgaactggaagcactgttagaaaagcaggcatataaagaacaggttctggccaaacgtctgaccatgctggaactgcttgaaaaatatccggcatgcgaaatgaaatttagcgaatttattgcactgctgccgtcaattcgtccgcgttattatagcattagcagcagtccgcgtgttgatgaaaaacaggcaagcattaccgtgagcgttgttagtggtgaagcctggtcaggttatggtgaatataaaggtattgccagcaattatctggccgaactgcaagaaggtgataccattacctgttttattagcacaccgcagagtgaatttaccctgcctaaagatcctgagacaccgctgattatggttggtcctggcaccggtgttgcaccgtttcgtggttttgtgcaggcacgtaaacaactgaaagaacaaggtcagagcctgggtgaagcacatctgtattttggttgtcgtagtccgcatgaggattatctgtaccaagaagaattagaaaacgcacagagcgaaggtattattaccctgcataccgcctttagtcgtatgccgaatcagcctaaaacctatgttcagcatgttatggaacaggacggcaaaaaactgatcgaactgctggatcaaggtgcccatttctatatttgtggtgatggtagccagatggcaccggcagtggaagcgaccctgatgaaatcctatgcagatgttcatcaggttagcgaagccgatgcacgcctgtggctgcagcaactggaagaaaaaggccgttatgccaaagatgtttgggcaggttaa

SEQ ID NO: 121 - DNA, 3147 bp, Artificial Sequence
  BM3 variant
gcaattaaagaaatgccgcagccgaaaacctttggcgaactgaaaaatctgccgctgctgaataccgataaaccggttcaggcactgatgaaaattgcagatgaactgggcgagatctttaaattcgaagcaccgggtcgtgttacccgttatctgagcagccagcgtctgattaaagaagcatgcgacgaaagccgctttgataaaaatctgggtcaagcactgaaatttctgcgcgattttgaaggtgatggtctggcaaccagctggacccatgaaaaaaactggaaaaaagcccataatattctgctgccgagctttagccagcaggcaatgaaaggttatcatgcaatgatggttgatattgccgttcagctggttcagaaatgggaacgtctgaatgccgatgaacatattgaagttccggaagatatgtttcgtctgaccctggataccattggtctgtgtggttttaactatcgcttcaacagcttttatcgtgatcagccgcatccgtttattaccagctattggcgtgcatatgacgagtatatgaataaactgcagcgtgcaaatccggatgatccggcatatgatgaaaacaaacgtcagtttcaagaggatatcaaggtgatgaatgatctggtggataaaatcattgcagatcgtaaagcaagcggtgaacagagtgatgatctgctgacccatatgctgaatggtaaagatccggaaaccggtgaaccgctggatgatgagaatattcgttatcagattatcacctttctgatcgcaggtcatgaaaccaccagtggtctgctgagctttgcactgtattttctggttaaaaatccgcacgtgctgcagaaagcagccgaagaagcagcacgcgttctggttgatccggttccgagctataaacaggttaaacagctgaaatatgttggcatggttctgaatgaagcactgcgtctgtggccgaccgcaccggcatttagcctgtatgcaaaagaagataccgttcttggcggtgaatatccgctggaaaaaggtgacgaactgatggtgctgattccgcagctgcatcgtgataaaaccatttggggtgatgatgtggaagaatttcgtccggaacgttttgaaaatccgagcgcaatcccgcagcatgcatttaaaccgtttggtaatggtcagcgtgcatgtattggtcagcagtttgcactgcatgaagcaaccctggttctgggtatgatgctgaaacattttgattttgaggaccacaccaactatgagctggatatcaaagaaaccctgacactgaaaccggaaggttttgttgttaaagccaagagcaaaaaaatcccgttaggtggtattccgagtccgagcaccgaacagagcgcaaaaaaagttcgtaaaaaagccgaaaatgcccataacacaccgctgctggttctgtatggtagcaatatgggtacagccgaaggcaccgcacgtgatctggcagatattgcaatgagtaaaggttttgcaccgcaggttgcaacactggatagccatgcaggtaatctgcctcgtgaaggtgcagttctgattgttaccgcaagctataatggtcatccgcctgataatgcaaaacagtttgttgattggctggatcaggcaagcgcagatgaagttaaaggtgttcgttatagcgtttttggttgcggtgacaaaaattgggcaaccacctatcagaaagttccggcttttattgatgaaaccctggcagcaaaaggtgcagaaaatattgccgatcgcggtgaagcagatgcaagtgatgactttgaaggcacctatgaagaatggcgtgaacacatgtggtcagatgttgcagcctattttaacctggatatcgaaaacagcgaggacaataaaagtaccctgagcctgcagtttgtggatagcgcagcagatatgccgctggccaaaatgcatggtgcatttagcaccaatgttgttgcaagcaaagaactgcagcagcctggtagcgcacgtagcacccgtcatctggaaattgaactgccgaaagaagcaagctatcaagagggtgatcatctgggtgttattccgcgtaattatgaaggtattgttaatcgtgtgaccgcacgttttggtctggatgcaagccagcagattcgtctggaagcagaagaagaaaaactggcacatctgcctctggcaaaaaccgttagcgttgaggaactgctgcaatatgtggaactgcaggatccggttacacgtacccagctgcgtgcaatggcagccaaaaccgtgtgtccgcctcataaagttgaactggaagcactgttagaaaagcaggcatataaagaacaggttctggccaaacgtctgaccatgctggaactgcttgaaaaatatccggcatgcgaaatgaaatttagcgaatttattgcactgctgccgtcaattcgtccgcgttattatagcattagcagcagtccgcgtgttgatgaaaaacaggcaagcattaccgtgagcgttgttagtggtgaagcctggtcaggttatggtgaatataaaggtattgccagcaattatctggccgaactgcaagaaggtgataccattacctgttttattagcacaccgcagagtgaatttaccctgcctaaagatcctgagacaccgctgattatggttggtcctggcaccggtgttgcaccgtttcgtggttttgtgcaggcacgtaaacaactgaaagaacaaggtcagagcctgggtgaagcacatctgtattttggttgtcgtagtccgcatgaggattatctgtaccaagaagaattagaaaacgcacagagcgaaggtattattaccctgcataccgcctttagtcgtatgccgaatcagcctaaaacctatgttcagcatgttatggaacaggacggcaaaaaactgatcgaactgctggatcaaggtgcccatttctatatttgtggtgatggtagccagatggcaccggcagtggaagcgaccctgatgaaatcctatgcagatgttcatcaggttagcgaagccgatgcacgcctgtggctgcagcaactggaagaaaaaggccgttatgccaaagatgtttgggcaggttaa

SEQ ID NO: 122 - DNA, 3147 bp, Artificial Sequence
  BM3 variant
gcaattaaagaaatgccgcagccgaaaacctttggcgaactgaaaaatctgccgctgctgaataccgataaaccggttcaggcactgatgaaaattgcagatgaactgggcgagatctttaaattcgaagcaccgggtcgtgttacccgttatctgagcagccagcgtctgattaaagaagcatgcgacgaaagccgctttgataaaaatctgggtcaagcactgaaatttctgcgcgattttgaaggtgatggtctggcaaccagctggacccatgaaaaaaactggaaaaaagcccataatattctgctgccgagctttagccagcaggcaatgaaaggttatcatgcaatgatggttgatattgccgttcagctggttcagaaatgggaacgtctgaatgccgatgaacatattgaagttccggaagatatgtttcgtctgaccctggataccattggtctgtgtggttttaactatcgcttcaacagcttttatcgtgatcagccgcatccgtttattaccagctattggcgtgcatatgacgagtatatgaataaactgcagcgtgcaaatccggatgatccggcatatgatgaaaacaaacgtcagtttcaagaggatatcaaggtgatgaatgatctggtggataaaatcattgcagatcgtaaagcaagcggtgaacagagtgatgatctgctgacccatatgctgaatggtaaagatccggaaaccggtgaaccgctggatgatgagaatattcgttatcagattatcacctttctgatcgcaggtcatgaaaccaccagtggtctgctgagctttgcactgtattttctggttaaaaatccgcacgtgctgcagaaagcagccgaagaagcagcacgcgttctggttgatccggttccgagctataaacaggttaaacagctgaaatatgttggcatggttctgaatgaagcactgcgtctgtggccgaccgcaccggcatttagcctgtatgcaaaagaagataccgttcttggcggtgaatatccgctggaaaaaggtgacgaactgatggtgctgattccgcagctgcatcgtgataaaaccatttggggtgatgatgtggaagaatttcgtccggaacgttttgaaaatccgagcgcaatcccgcagcatgcatttaaaccgtttggtaatggtcagcgtgcatgtattggtcagcagtttgcactgcatgaagcaaccctggttctgggtatgatgctgaaacattttgattttgaggaccacaccaactatgagctggatatcaaagaaaccctgacactgaaaccggaaggttttgttgttaaagccaagagcaaaaaaatcccgttaggttctggtccgagtccgagcaccgaacagagcgcaaaaaaagttcgtaaaaaagccgaaaataaccataacacaccgctgctggttctgtatggtagcaatatgggtacagccgaaggcaccgcacgtgatctggcagatattgcaatgagtaaaggttttgcaccgcaggttgcaacactggatagccatgcaggtaatctgcctcgtgaaggtgcagttctgattgttaccgcaagctataatggtcatccgcctgataatgcaaaacagtttgttgattggctggatcaggcaagcgcagatgaagttaaaggtgttcgttatagcgtttttggttgcggtgacaaaaattgggcaaccacctatcagaaagttccggcttttattgatgaaaccctggcagcaaaaggtgcagaaaatattgccgatcgcggtgaagcagatgcaagtgatgactttgaaggcacctatgaagaatggcgtgaacacatgtggtcagatgttgcagcctattttaacctggatatcgaaaacagcgaggacaataaaagtaccctgagcctgcagtttgtggatagcgcagcagatatgccgctggccaaaatgcatggtgcatttagcaccaatgttgttgcaagcaaagaactgcagcagcctggtagcgcacgtagcacccgtcatctggaaattgaactgccgaaagaagcaagctatcaagagggtgatcatctgggtgttattccgcgtaattatgaaggtattgttaatcgtgtgaccgcacgttttggtctggatgcaagccagcagattcgtctggaagcagaagaagaaaaactggcacatctgcctctggcaaaaaccgttagcgttgaggaactgctgcaatatgtggaactgcaggatccggttacacgtacccagctgcgtgcaatggcagccaaaaccgtgtgtccgcctcataaagttgaactggaagcactgttagaaaagcaggcatataaagaacaggttctggccaaacgtctgaccatgctggaactgcttgaaaaatatccggcatgcgaaatgaaatttagcgaatttattgcactgctgccgtcaattcgtccgcgttattatagcattagcagcagtccgcgtgttgatgaaaaacaggcaagcattaccgtgagcgttgttagtggtgaagcctggtcaggttatggtgaatataaaggtattgccagcaattatctggccgaactgcaagaaggtgataccattacctgttttattagcacaccgcagagtgaatttaccctgcctaaagatcctgagacaccgctgattatggttggtcctggcaccggtgttgcaccgtttcgtggttttgtgcaggcacgtaaacaactgaaagaacaaggtcagagcctgggtgaagcacatctgtattttggttgtcgtagtccgcatgaggattatctgtaccaagaagaattagaaaacgcacagagcgaaggtattattaccctgcataccgcctttagtcgtatgccgaatcagcctaaaacctatgttcagcatgttatggaacaggacggcaaaaaactgatcgaactgctggatcaaggtgcccatttctatatttgtggtgatggtagccagatggcaccggcagtggaagcgaccctgatgaaatcctatgcagatgttcatcaggttagcgaagccgatgcacgcctgtggctgcagcaactggaagaaaaaggccgttatgccaaagatgtttgggcaggttaa

SEQ ID NO: 123 - protein, 22 aa, Artificial Sequence
  Linker
GKHIIQGPMYDVSGTAPVNVTN

SEQ ID NO: 124 - protein, 24 aa, Artificial Sequence
  Linker
LRASVSAIQQTTKQIYDDQSLVNV

SEQ ID NO: 125 - protein, 26 aa, Artificial Sequence
  Linker
AASKPEFIKPEDVSAEVVEKEYQVQL

SEQ ID NO: 126 - protein, 16 aa, Artificial Sequence
  Linker
AKKPLNTEGVMKSRSN

SEQ ID NO: 127 - protein, 49 aa, Artificial Sequence
  Linker
SAAAATPAVRTVPQYKYAAGVRNPQQHLNAQPQVTMQQPAVHVQGQEPL

SEQ ID NO: 128 - protein, 20 aa, Artificial Sequence
  Linker
TVHFESFGATNTNARENTPF

SEQ ID NO: 129 - protein, 19 aa, Artificial Sequence
  Linker
ENPGVTQLNRLAAHPPFAS

SEQ ID NO: 130 - protein, 16 aa, Artificial Sequence
  Linker
VKMVRVQAIEKNRYRA

SEQ ID NO: 131 - protein, 17 aa, Artificial Sequence
  Linker
VREALLRRQRAFRELPG

SEQ ID NO: 132 - protein, 14 aa, Artificial Sequence
  Linker
IRPRAIGGSKPRVA

SEQ ID NO: 133 - protein, 14 aa, Artificial Sequence
  Linker
DETYVPKEFNAETF

SEQ ID NO: 134 - protein, 15 aa, Artificial Sequence
  Linker
WQYTAATATPTIGHV

SEQ ID NO: 135 - protein, 12 aa, Artificial Sequence
  Linker
ARKLLSPEVAND

SEQ ID NO: 136 - protein, 26 aa, Artificial Sequence
  Linker
VQTPGHANQSMMPQFIMPANNQFSAQ

SEQ ID NO: 137 - protein, 20 aa, Artificial Sequence
  Linker
GGGGSGGGGSGGGGSGGGGS

SEQ ID NO: 138 - protein, 15 aa, Artificial Sequence
  Linker
GGGGSGGGGSGGGGS

SEQ ID NO: 139 - protein, 16 aa, Artificial Sequence
  Linker
APAPAPAPAPAPAPAP

SEQ ID NO: 140 - protein, 16 aa, Artificial Sequence
  Linker
PSTEQSAKKVRKKAEN

SEQ ID NO: 141 - protein, 16 aa, Artificial Sequence
  Linker
PSPSTEQSKVRKKAEN

SEQ ID NO: 142 - protein, 13 aa, Artificial Sequence
  Linker
PSPSTEQSAKKVR

SEQ ID NO: 143 - protein, 39 aa, Artificial Sequence
  Linker
TKLPEAQQRVGGCFLNLMPQMKTLYLTYCANHPSAVNVL

SEQ ID NO: 144 - protein, 17 aa, Artificial Sequence
  Linker
GNVPELPDTTEHSRTDL

SEQ ID NO: 145 - protein, 17 aa, Artificial Sequence
  Linker
TARKGKGAFCNGQKLQV

SEQ ID NO: 146 - protein, 18 aa, Artificial Sequence
  Linker
PSDNVDAQLYNGFFSDAD

SEQ ID NO: 147 - protein, 19 aa, Artificial Sequence
  Linker
AMSLYLAGEISLLILDEPT

SEQ ID NO: 148 - protein, 18 aa, Artificial Sequence
  Linker
GCAWYELMPAETTVRLRA

SEQ ID NO: 149 - protein, 16 aa, Artificial Sequence
  Linker
LSLEVAEEIARLEAEV

SEQ ID NO: 150 - protein, 12 aa, Artificial Sequence
  Linker
ASSYTAPQPGLG

SEQ ID NO: 151 - protein, 12 aa, Artificial Sequence
  Linker
IPVPTRDLEKPF

SEQ ID NO: 152 - protein, 12 aa, Artificial Sequence
  Linker
VIGYMPIPVGVA

SEQ ID NO: 153 - protein, 11 aa, Artificial Sequence
  Linker
RGRWMARLARM

SEQ ID NO: 154 - protein, 11 aa, Artificial Sequence
  Linker
FLMKLINRPII

SEQ ID NO: 155 - protein, 7 aa, Artificial Sequence
  Linker
LSPDEAP

SEQ ID NO: 156 - protein, 6 aa, Artificial Sequence
  Linker
VEPPDL

SEQ ID NO: 157 - protein, 6 aa, Artificial Sequence
  Linker
FITPII

SEQ ID NO: 158 - protein, 9 aa, Artificial Sequence
  Linker
LRKMRTGKP

SEQ ID NO: 159 - protein, 10 aa, Artificial Sequence
  Linker
SNSTMKKHGR

SEQ ID NO: 160 - protein, 7 aa, Artificial Sequence
  Linker
YLSITFL

SEQ ID NO: 161 - protein, 10 aa, Artificial Sequence
  Linker
AAAEKNVPLY

SEQ ID NO: 162 - protein, 8 aa, Artificial Sequence
  Linker
SEFEDPLV

SEQ ID NO: 163 - protein, 5 aa, Artificial Sequence
  Linker
KRSPW

SEQ ID NO: 164 - protein, 5 aa, Artificial Sequence
  Linker
NASCT

SEQ ID NO: 165 - protein, 5 aa, Artificial Sequence
  Linker
IQRKK

SEQ ID NO: 166 - protein, 5 aa, Artificial Sequence
  Linker
EDSGF

SEQ ID NO: 167 - protein, 5 aa, Artificial Sequence
  Linker
FVGVL

SEQ ID NO: 168 - protein, 10 aa, Artificial Sequence
  Linker
GGGGSGGGGS

SEQ ID NO: 169 - protein, 5 aa, Artificial Sequence
  Linker
GGGGS

SEQ ID NO: 170 - protein, 5 aa, Artificial Sequence
  Linker
PAPAP

SEQ ID NO: 171 - protein, 13 aa, Artificial Sequence
  Linker
PSPSTEVRKKAEN

SEQ ID NO: 172 - protein, 10 aa, Artificial Sequence
  Linker
PSPSTKKAEN

SEQ ID NO: 173 - protein, 3 aa, Artificial Sequence
  Linker
PEN
